(19) United States
(12) Patent Application Publication
(10) Pub. No.: US 2023/0416308 A1
(43) Pub. Date: Dec. 28, 2023

(54) ENCAPSULATED RNA REPLICONS AND METHODS OF USE

(71) Applicant: Oncorus, Inc., Andover, MA (US)

(72) Inventors: Lorena LERNER, Cambridge, MA (US); Edward M. KENNEDY, Cambridge, MA (US); Jennifer S. LEE, Cambridge, MA (US)

(21) Appl. No.: 17/999,582

(22) PCT Filed: May 28, 2021
(86) PCT No.: PCT/US2021/034787

§ 371 Date: Nov. 22, 2022

Related U.S. Application Data
(60) Provisional application No. 63/032,000, filed on May 29, 2020.

(51) Int. Cl. C07K 14/005; C12N 15/86; C07K 14/55; C07K 14/54; C07K 16/28; C07K 14/52; A61K 9/127; A61P 35/00; A61K 39/125

(52) U.S. Cl. CPC C07K 14/005; A61K 2039/86; C12Y 304/23016; C07K 14/55; C07K 14/54; C07K 16/28; C07K 16/2809; C07K 14/522; A61K 9/127; A61P 35/00; C07K 14/5434; C07K 14/523; A61K 39/125; C12N 2770/32052; C12N 2770/32043; C12N 2770/32071; C07K 2319/50; C07K 2319/21; C07K 2317/622; C07K 2317/31; C07K 2317/569; C12N 15/86

(57) ABSTRACT

The disclosure relates to oncolytic virus derived replicons and capsidation of the same. The disclosure also relates to the incorporation of one or more transgenes encoding payload molecules into the replicon. The disclosure further relates to the encapsulation of the replicon and/or recombinant RNA molecules encoding oncolytic viruses into particles and the use of the replicon and/or particles for the treatment and prevention of cancer.

### CROSS-REFERENCE TO RELATED APPLICATIONS

[0001] This application is a U.S. National Phase Application, filed under 35 U.S.C. § 371, of International Application No. PCT/US2021/034787, filed May 28, 2021, which claims priority to U.S. Provisional Application No. 63/032,000, filed May 29, 2020, the contents of each of which are incorporated by reference in their entirety.

### INCORPORATION BY REFERENCE OF SEQUENCE LISTING

[0002] The contents of the text file submitted electronically herewith are incorporated herein by reference in their entirety: A computer readable format copy of the Sequence Listing (filename: ONCR_019_01US_SeqList_ST25.txt, date created: Nov. 21, 2022, file size: 790,366 bytes).

### FIELD

[0003] The present disclosure generally relates to the fields of immunology, inflammation, and cancer therapeutics. More specifically, the present disclosure relates to viral replicons with improved loading capacity and heterologous polynucleotide encoding payload molecules, as well as particle-encapsulated viral replicons. The disclosure further relates to the treatment and prevention of proliferative disorders such as cancer.

### BACKGROUND

[0004] There remains a long-felt and unmet need in the art for compositions and methods related to therapeutic use of virus and/or viral replicons comprising improved loading capacity and/or functionality for one or more therapeutic molecules. The present disclosure provides such compositions and methods, and more.

### SUMMARY

[0005] The disclosure provides recombinant RNA replicons comprising: a) a picornavirus genome, wherein the picornavirus genome comprises a deletion or a truncation in one or more protein coding regions; and b) a heterologous polynucleotide. In some embodiments, the picornavirus genome comprises the deletion or the truncation in one or more VP coding regions. In some embodiments, the picornavirus genome comprises the deletion or the truncation in each of the VP1, VP3 and VP2 coding regions. In some embodiments, the picornavirus genome comprises the deletion of the VP1 and VP3 coding regions and the truncation of the VP2 coding region. In some embodiments, the picornavirus is selected from a senecavirus, a cardiovirus, and an enterovirus. In some embodiments, the deletion or the truncation comprises at least 500 bp, at least 1000 bp, at least 1500 bp, at least 2000 bp, at least 2500 bp, or at least 3000 bp. In some embodiments, the deletion or the truncation comprises at least 2000 bp. In some embodiments, a site of the deletion or a site of the truncation comprises the heterologous polynucleotide. In some embodiments, the heterologous polynucleotide is inserted between a 2A coding region and a 2B coding region. In some embodiments, the heterologous polynucleotide is inserted between a 3D coding region and a 3′ untranslated region (UTR). In some embodiments, the heterologous polynucleotide comprises at least 1000 bp, at least 2000 bp, or at least 3000 bp.

[0006] The disclosure provides recombinant RNA replicons comprising: a) a Seneca Valley Virus (SVV) genome, wherein the SVV genome comprises a deletion or a truncation in one or more protein coding regions; and b) a heterologous polynucleotide (i.e., the replicon is a SVV derived replicon). In some embodiments, the deletion or the truncation comprises one or more nucleotides between nucleotide 1261 and 3477, inclusive of the endpoints, according to the numbering of SEQ ID NO: 1. In some embodiments, the deletion or the truncation comprises nucleotide 1261 to 3477, inclusive of the endpoints, according to the numbering of SEQ ID NO: 1. In some embodiments, the deletion or the truncation comprises at least 500 bp, at least 1000 bp, at least 1500 bp, or at least 2000 bp. In some embodiments, the deletion or the truncation comprises at least 2000 bp. In some embodiments, the SVV genome comprises a 5′ leader protein coding sequence. In some embodiments, the SVV genome comprises a VP4 coding region. In some embodiments, the SVV genome comprises a VP2 coding region or a truncation thereof. In some embodiments, the SVV genome comprises, from 5′ to 3′ direction, the 5′ leader protein coding sequence, the VP4 coding region, and the VP2 coding region or a truncation thereof. In some embodiments, a portion of the SVV genome comprising the 5′ leader protein coding sequence, the VP4 coding region, and the VP2 coding region or a truncation thereof has at least 90% sequence identity to nucleotide 1 to 1260 of SEQ ID NO: 1. In some embodiments, the SVV genome comprises, from 5′ to 3′ direction, the 5′ leader protein coding sequence, the VP4 coding region, the VP2 coding region or a truncation thereof, and the heterologous polynucleotide. In some embodiments, the SVV genome comprises a cis-acting replication element (CRE). In some embodiments, the CRE comprises between 10-200 bp. In some embodiments, the CRE comprises one or more nucleotides within the region corresponding to nucleotide 1000 to nucleotide 1260 according to SEQ ID NO: 1. In some embodiments, the CRE comprises one or more nucleotides within the region corresponding to nucleotide 1117 to nucleotide 1260 according to SEQ ID NO: 1. In some embodiments, the CRE comprises a polynucleotide sequence having at least 70%, at least 75%, at least 80%, at least 85%, at least 90%, at least 95%, at least 96%, at least 97%, at least 98%, at least 99%, or 100% identity to SEQ ID NO: 149. In some embodiments, the SVV genome further comprises a 2A coding region. In some embodiments, the 2A coding region is located between the VP2 coding region or a truncation thereof and the heterologous polynucleotide. In some embodiments, the SVV genome comprises one or more of a 2B coding region, a 2C coding region, a 3A coding region, a 3B coding region, a 3Cpro coding region, and a 3D(RdRp) coding region. In some embodiments, the SVV genome comprises a 2B coding region, a 2C coding region, a 3A coding region, a 3B coding region, a 3Cpro coding region, and a 3D(RdRp) coding region. In some embodiments, the SVV genome comprises, from 5′ to 3′, the 2B coding region, the 2C coding region, the 3A coding region, the 3B coding region, the 3Cpro coding region, and the 3D(RdRp) coding region. In some embodiments, a portion of the SVV genome comprising the 2B coding region, the 2C coding region, the 3A coding region, the 3B coding region, the 3Cpro coding region, and the 3D(RdRp) coding region has at least 90% sequence identity to nucleotide 3505 to 7310 according to SEQ ID NO: 1. In some embodiments, the SVV genome comprises, from 5′ to 3′, the heterologous polynucleotide and the 2B coding region.

[0007] The disclosure provides recombinant RNA replicons comprising: a) a coxsackievirus genome, wherein the coxsackievirus genome comprises a deletion or a truncation in one or more protein coding regions; and b) a heterologous polynucleotide (i.e., the replicon is a coxsackievirus derived replicon). In some embodiments, the deletion or the truncation comprises one or more nucleotides between nucleotide 717 to 3332, inclusive of the endpoints, according to the numbering of SEQ ID NO: 3. In some embodiments, the deletion or the truncation comprises nucleotide 717 to 3332, inclusive of the endpoints, according to the numbering of SEQ ID NO: 3. In some embodiments, the deletion or the truncation comprises at least 500 bp, at least 1000 bp, at least 1500 bp, at least 2000 bp, or at least 2600 bp. In some embodiments, the coxsackievirus genome comprises a 5′ UTR. In some embodiments, a portion of the coxsackievirus genome comprising the 5′ UTR has at least 90% sequence identity to SEQ ID NO: 4. In some embodiments, the coxsackievirus genome comprises one or more of a 2A coding region, a 2B coding region, a 2C coding region, a 3A coding region, a 3B coding region, a VPg coding region, a 3C coding region, a 3D pol coding region, and a 3′ UTR. In some embodiments, the coxsackievirus genome comprises a 2A coding region, a 2B coding region, a 2C coding region, a 3A coding region, a 3B coding region, a VPg coding region, a 3C coding region, a 3D pol coding region, and a 3′ UTR. In some embodiments, the coxsackievirus genome comprises, from 5′ to 3′ direction, the 2A coding region, the 2B coding region, the 2C coding region, the 3A coding region, the 3B coding region, the VPg coding region, the 3C coding region, the 3D pol coding region, and the 3′ UTR. In some embodiments, a portion of the coxsackievirus genome comprising the 2A coding region, the 2B coding region, the 2C coding region, the 3A coding region, the 3B coding region, the VPg coding region, the 3C coding region, the 3D pol coding region, and the 3′ UTR has at least 90% sequence identity to nucleotide 3492 to 7435 in SEQ ID NO: 3. In some embodiments, the coxsackievirus genome comprises, from 5′ to 3′, the 5′ UTR, the heterologous polynucleotide, and the 2A coding region.

[0008] The disclosure provides recombinant RNA replicons comprising: a) a encephalomyocarditis virus (EMCV) genome, wherein the EMCV genome comprises a deletion or a truncation in one or more protein coding regions; and b) a heterologous polynucleotide (i.e., the replicon is a EMCV derived replicon).

[0009] In some embodiments, the recombinant RNA replicon comprises an internal ribosome entry site (IRES) inserted between the heterologous polynucleotide and the 2B coding region.

[0010] In some embodiments, the heterologous polynucleotide of the recombinant RNA replicon encodes one or more payload molecules. In some embodiments, the heterologous polynucleotide of the recombinant RNA replicon encodes two or more payload molecules. In some embodiments, the two or more payload molecules are operably linked by one or more cleavage polypeptides. In some embodiments, the cleavage polypeptide comprises a 2A family self-cleaving peptide, a 3C cleavage site, a furin site, an IGSF1 polypeptide, or a HIV protease site. In some embodiments, the cleavage polypeptide comprises an IGSF1 polypeptide, and wherein the IGSF1 polypeptide comprises an amino acid sequence having at least 90% identity to SEQ ID NO: 75. In some embodiments, the cleavage polypeptide comprises an HIV protease site. In some embodiments, the cleavage polypeptide comprises a 2A family self-cleaving peptide. In some embodiments, the cleavage polypeptide comprises a furin site. In some embodiments, the heterologous polynucleotide encodes a polypeptide comprising the two or more payload molecules and the cleavage polypeptide comprising, from N-terminus to C-terminus: N′-payload molecule 1-cleavage polypeptide-payload molecule 2-C′. In some embodiments, the heterologous polynucleotide further comprises a coding region that encodes an HIV protease, and wherein the heterologous polynucleotide comprises a coding region that encodes a polypeptide comprising, from N-terminus to C-terminus: N′-Payload molecule 1-HIV protease site-HIV protease-HIV protease site-Payload molecule 2-C′. In some embodiments, the heterologous polynucleotide further comprises a coding region that encodes a third payload molecule, and wherein the heterologous polynucleotide comprises a coding region that encodes a polypeptide comprising, from N-terminus to C-terminus: N′-Payload molecule 1-HIV protease site-HIV protease-HIV protease site-Payload molecule 2-HIV protease site-Payload molecule 3-C′. In some embodiments, the recombinant RNA replicon of the disclosure further comprises a cleavage polypeptide at the C-terminus of the encoded polypeptide.

[0011] In some embodiments, the payload molecules are selected from a fluorescent protein, an enzyme, a cytokine, a chemokine, an antigen, an antigen-binding molecule capable of binding to a cell surface receptor, and a ligand for a cell-surface receptor. In some embodiments, the payload molecules are selected from:
[0012] a) one or more cytokines comprising IFNγ, GM-CSF, IL-2, IL-12, IL-15, IL-18, IL-23, and IL-36γ;
[0013] b) one or more chemokines comprising CXCL10, CCL4, CCL5, and CCL21;
[0014] c) one or more antibodies comprising an anti-PD1-VHH-Fc antibody, an anti-CD47-VHH-Fc antibody, and an anti-TGFβ-VHH(or scFv)-Fc antibody;
[0015] d) one or more bipartite polypeptides comprising a bipartite polypeptide binding to DLL3 and an effector cell target antigen, a bipartite polypeptide binding to FAP and an effector cell target antigen, and a bipartite polypeptide binding to EpCAM and an effector cell target antigen;
[0016] e) one or more tumor-associated antigens comprising survivin, MAGE family proteins, and all antigens according to Table 6;
[0017] f) one or more tumor neoantigens;
[0018] g) one or more bipartite polypeptides binding to MHC-peptide antigen complex;
[0019] h) one or more fusogenic proteins comprising herpes simplex virus (HSV) UL27/glycoprotein B/gB, HSV UL53/glycoprotein K/gK, Respiratory syncytial virus (RSV) F protein, FASTp15, VSV-G, syncitin-1 (from human endogenous retrovirus-W (HERV-W)) or syncitin-2 (from HERVFRDE1), paramyxovirus SV5-F, measles virus-H, measles virus-F, the glycoprotein from a retrovirus or lentivirus, such as gibbon ape leukemia virus (GALV), murine leukemia virus (MLV), Mason-Pfizer monkey virus (MPMV) and equine infectious anemia virus (EIAV), optionally with the R transmembrane peptide removed (R-versions);
[0020] i) one or more other payload molecules comprising IL15R, PGDH, ADA, ADA2, HYAL1, HYAL2, CHIPS, MLKL (or its 4HB domain only), GSDMD (or its L192A mutant, or its amino acids 1-233 fragment, or its amino acids 1-233 fragment with L192A mutation), GSDME (or its amino acid 1-237 fragment), HMGB1 (or its Box B domain only), Melittin (e.g., alpha-Melittin), SMAC/Diablo (or its amino acid 56-239 fragment), Snake LAAO, Snake disintegrin, Leptin, FLT3L, TRAIL, Gasdermin D or a truncation thereof, Gasdermin E or a truncation thereof;
[0021] j) one or more antigens from pathogens comprising Dengue virus, Chikungunya virus, Mycobacterium tuberculosis, Human immunodeficiency viruses, SARS-CoV-2, Coronavirus, Hepatitis B Virus, Togaviridae family virus, Flaviviridae family virus, Influenza A virus, Influenza B virus, and a veterinary virus; or
[0022] k) any combination thereof.

[0023] In some embodiments, the two or more payload molecules are selected from the group consisting of a fluorescent protein, an enzyme, a cytokine, a chemokine, an antigen-binding molecule capable of binding to a cell surface receptor, and a ligand for a cell-surface receptor. In some embodiments, the heterologous polynucleotide encodes two or more payload molecules comprising:
[0024] IL-2 and IL-36γ;
[0025] CXCL10 and an antigen binding molecule binding to FAP and CD3;
[0026] IL-2 and an antigen binding molecule binding to DLL3 and CD3;
[0027] IL-36γ and an antigen binding molecule binding to DLL3 and CD3; or
[0028] IL-2, IL-36γ and an antigen binding molecule binding to DLL3 and CD3.

[0029] In some embodiments, the recombinant RNA replicon of the disclosure further comprises a microRNA (miRNA) target sequence (miR-TS) cassette comprising one or more miRNA target sequences. In some embodiments, the one or more miRNAs comprise miR-124, miR-1, miR-143, miR-128, miR-219, miR-219a, miR-122, miR-204, miR-217, miR-137, and miR-126.

[0030] The disclosure provides recombinant DNA molecules comprising, from 5′ to 3′, a promoter sequence, a 5′ junctional cleavage sequence, a polynucleotide sequence encoding the recombinant RNA replicon of the disclosure, and a 3′ junctional cleavage sequence. In some embodiments, the promoter sequence is a T7 promoter sequence. In some embodiments, the 5′ junctional cleavage sequence is a ribozyme sequence and the 3′ junctional cleavage sequence is a ribozyme sequence. In some embodiments, the 5′ ribozyme sequence is a hammerhead ribozyme sequence and wherein the 3′ ribozyme sequence is a hepatitis delta virus ribozyme sequence. In some embodiments, the 5′ junctional cleavage sequence is a ribozyme sequence and the 3′ junctional cleavage sequence is a restriction enzyme recognition sequence. In some embodiments, the 5′ ribozyme sequence is a hammerhead ribozyme sequence, a Pistol ribozyme sequence, or a modified Pistol ribozyme sequence. In some embodiments, 3′ restriction enzyme recognition sequence is a Type IIS restriction enzyme recognition sequence. In some embodiments, the Type IIS recognition sequence is a SapI recognition sequence. In some embodiments, the 5′ junctional cleavage sequence is an RNAseH primer binding sequence and the 3′ junctional cleavage sequence is a restriction enzyme recognition sequence.

[0031] The disclosure provides methods of producing the recombinant RNA replicon comprising in vitro transcription of the DNA molecule of the disclosure and purification of the resulting recombinant RNA replicon.

[0032] The disclosure provides compositions comprising an effective amount of the recombinant RNA replicon of the disclosure and a carrier suitable for administration to a mammalian subject.

[0033] The disclosure provides vectors comprising the recombinant RNA replicon of the disclosure. In some embodiments, the vector is a viral vector. In some embodiments, the vector is a non-viral vector.

[0034] The disclosure provides particles comprising the recombinant RNA replicon of the disclosure. In some embodiments, the particle is selected from the group consisting of a nanoparticle, an exosome, a liposome, and a lipoplex. In some embodiments, the nanoparticle is a lipid nanoparticle (LNP) comprising a cationic lipid, one or more helper lipids, and a phospholipid-polymer conjugate. In some embodiments, the cationic lipid is selected from DLinDMA, DLin-KC2-DMA, DLin-MC3-DMA (MC3), COATSOME® SS-LC (former name: SS-18/4PE-13), COATSOME® SS-EC (former name: SS-33/4PE-15), COATSOME® SS-OC, COATSOME® SS-OP, Di((Z)-non-2-en-1-yl)9-((4-dimethylamino)butanoyl)oxy)heptadecanedioate (L-319), or N-(2,3-dioleoyloxy)propyl)-N,N,N-trimethylammonium chloride (DOTAP). In some embodiments, the helper lipid is selected from 1,2-distearoyl-sn-glycero-3-phosphocholine (DSPC); 1,2-dilauroyl-sn-glycero-3-phosphoethanolamine (DLPE); 1,2-dioleoyl-sn-glycero-3-phosphocholine (DOPC); 1,2-dioleoyl-sn-glycero-3-phosphoethanolamine (DOPE); and cholesterol. In some embodiments, the cationic lipid is 1,2-dioleoyl-3-trimethylammonium-propane (DOTAP), and wherein the neutral lipid is 1,2-Dilauroyl-sn-glycero-3-phosphoethanolamine (DLPE) or 1,2-Dioleoyl-sn-glycero-3-phosphoethanolamine (DOPE). In some embodiments, the phospholipid-polymer conjugate is selected from 1,2-distearoyl-sn-glycero-3-phosphoethanolamine-N-[amino(polyethyleneglycol)] (DSPE-PEG); 1,2-dipalmitoyl-rac-glycerol methoxypolyethylene glycol (DPG-PEG); 1,2-distearoyl-rac-glycero-3-methylpolyoxyethylene (DSG-PEG); 1,2-distearoyl-rac-glycero-3-methylpolyoxyethylene (DSG-PEG); 1,2-dimyristoyl-rac-glycero-3-methylpolyoxyethylene (DMG-PEG); and 1,2-dimyristoyl-rac-glycero-3-methylpolyoxyethylene (DMG-PEG), or 1,2-distearoyl-sn-glycero-3-phosphoethanolamine-N-[amino(polyethylene glycol)] (DSPE-PEG-amine). In some embodiments, the phospholipid-polymer conjugate is selected from 1,2-distearoyl-sn-glycero-3-phosphoethanolamine-N-[amino(polyethyleneglycol)-5000] (DSPE-PEG5K); 1,2-dipalmitoyl-rac-glycerol methoxypolyethylene glycol-2000 (DPG-PEG2K); 1,2-distearoyl-rac-glycero-3-methylpolyoxyethylene-5000 (DSG-PEG5K); 1,2-distearoyl-rac-glycero-3-methylpolyoxyethylene-2000 (DSG-PEG2K); 1,2-dimyristoyl-rac-glycero-3-methylpolyoxyethylene-5000 (DMG-PEG5K); and 1,2-dimyristoyl-rac-glycero-3-methylpolyoxyethylene-2000 (DMG-PEG2K). In some embodiments, the cationic lipid comprises COATSOME® SS-OC, wherein the one or more helper lipids comprise cholesterol (Chol) and DSPC, and wherein the phospholipid-polymer conjugate comprises DPG-PEG2000. In some embodiments, the ratio of SS-OC:DSPC:Chol:DPG-PEG2K (as a percentage of total lipid content) is A:B:C:D, wherein:
[0035] (a) A=40%-60%, B=10%-25%, C=20%-30%, and D=0%-3% and wherein A+B+C+D=100%;
[0036] (b) A=45%-50%, B=20%-25%, C=25%-30%, and D=0%-1% and wherein A+B+C+D=100%
[0037] (c) A=40%-60%, B=10%-30%, C=20%-45%, and D=0%-3% and wherein A+B+C+D=100%;
[0038] (d) A=40%-60%, B=10%-30%, C=25%-45%, and D=0%-3% and wherein A+B+C+D=100%;
[0039] (e) A=45%-55%, B=10%-20%, C=30%-40%, and D=1%-2% and wherein A+B+C+D=100%;
[0040] (f) A=45%-50%, B=10%-15%, C=35%-40%, and D=1%-2% and wherein A+B+C+D=100%;
[0041] (g) A=45%-65%, B=5%-20%, C=20%-45%, and D=0%-3% and wherein A+B+C+D=100%;
[0042] (h) A=50%-60%, B=5%-15%, C=30%-45%, and D=0%-3% and wherein A+B+C+D=100%;
[0043] (i) A=55%-60%, B=5%-15%, C=30%-40%, and D=1%-2% and wherein A+B+C+D=100%; or
[0044] (j) A=55%-60%, B=5%-10%, C=30%-35%, and D=1%-2% and wherein A+B+C+D=100%.

[0045] In some embodiments, the ratio of SS-OC:DSPC:Chol:DPG-PEG2K (as a percentage of total lipid content) is: about 49:22:28.5:0.5; about 49:11:38.5:1.5; or about 58:7:33.5:1.5. In some embodiments, the ratio of SS-OC:DSPC:Chol:DPG-PEG2K (as a percentage of total lipid content) is about 49:22:28.5:0.5. In some embodiments, the cationic lipid is 1,2-dioleoyl-3-trimethylammonium-propane (DOTAP), and wherein the neutral lipid is 1,2-Dilauroyl-sn-glycero-3-phosphoethanolamine (DLPE) or 1,2-Dioleoyl-sn-glycero-3-phosphoethanolamine (DOPE).

[0046] In some embodiments, the particle of the disclosure further comprises a phospholipid-polymer conjugate, wherein the phospholipid-polymer conjugate is 1, 2-Distearoyl-sn-glycero-3-phosphoethanolamine-Poly(ethylene glycol) (DSPE-PEG) or 1,2-distearoyl-sn-glycero-3-phosphoethanolamine-N-[amino(polyethylene glycol)] (DSPE-PEG-amine).

[0047] In some embodiments, the particle of the disclosure further comprises a second recombinant RNA molecule encoding an oncolytic virus. In some embodiments, the oncolytic virus is a picornavirus. In some embodiments, the picornavirus is selected from a senecavirus, a cardiovirus, and an enterovirus. In some embodiments, the picornavirus is a Seneca Valley Virus (SVV). In some embodiments, the picornavirus is a Coxsackievirus. In some embodiments, the picornavirus is an encephalomyocarditis virus (EMCV).

[0048] The disclosure provides therapeutic compositions comprising a plurality of lipid nanoparticles of the disclosure. In some embodiments, the plurality of LNPs have an average size of about 50 nm to about 120 nm. In some embodiments, the plurality of LNPs have an average size of about 100 nm. In some embodiments, the plurality of LNPs have an average zeta-potential of between about 20 mV to about −20 mV, about 10 mV to about −10 mV, about 5 mV to about −5 mV, or about 20 mV to about −40 mV, −50 mV to about −20 mV, about −40 mV to about −20 mV, or about −30 mV to about −20 mV. In some embodiments, the plurality of LNPs have an average zeta-potential of about −30 mV, about −31 mV, about −32 mV, about −33 mV, about −34 mV, about −35 mV, about −36 mV, about −37 mV, about −38 mV, about −39 mV, or about −40 mV.

[0049] The disclosure provides methods of killing a cancerous cell comprising exposing the cancerous cell to the particle, the vector, the recombinant RNA replicon, or compositions of the disclosure. In some embodiments, the method is performed in vivo, in vitro, or ex vivo.

[0050] The disclosure provides methods of treating a cancer in a subject comprising administering to the subject suffering from the cancer an effective amount of the particle, the vector, the recombinant RNA replicon, or compositions of the disclosure. In some embodiments, the recombinant RNA replicon, or composition thereof is administered intravenously, intranasally, as an inhalant, or is injected directly into a tumor. In some embodiments, the particle, the recombinant RNA replicon, or composition thereof is administered to the subject repeatedly. In some embodiments, the subject is a mouse, a rat, a rabbit, a cat, a dog, a horse, a non-human primate, or a human.

[0051] In some embodiments, the cancer is selected from lung cancer, breast cancer, ovarian cancer, cervical cancer, prostate cancer (e.g., Castration resistant neuroendocrine prostate cancer), testicular cancer, colorectal cancer, colon cancer, pancreatic cancer, liver cancer, gastric cancer, head and neck cancer, thyroid cancer, malignant glioma, glioblastoma, melanoma, B-cell chronic lymphocytic leukemia, diffuse large B-cell lymphoma (DLBCL), sarcoma, a neuroblastoma, a neuroendocrine cancer, a rhabdomyosarcoma, a medulloblastoma, a bladder cancer, marginal zone lymphoma (MZL), Merkel cell carcinoma, and renal cell carcinoma. In some embodiments, the lung cancer is small cell lung cancer or non-small cell lung cancer; the liver cancer is hepatocellular carcinoma (HCC); and/or the prostate cancer is treatment-emergent neuroendocrine prostate cancer. In some embodiments, the cancer is a neuroendocrine cancer.

[0052] The disclosure provides methods of immunizing a subject against a disease, comprising administering to the subject an effective amount of the particle, the vector, the recombinant RNA replicon, or compositions of the disclosure. In some embodiments, the particle, the recombinant RNA replicon, or composition thereof is administered intravenously, intramuscularly, intradermally, intranasally, or as an inhalant. In some embodiments, the particle, the recombinant RNA replicon, or composition thereof is administered to the subject repeatedly. In some embodiments, the disease is an infectious disease. In some embodiments, the infectious disease is caused by one of the pathogens comprising Dengue virus, Chikungunya virus, Mycobacterium tuberculosis, Human immunodeficiency virus, SARS-CoV-2, Coronavirus, Hepatitis B virus, Togaviridae family virus, Flaviviridae family virus, Influenza A virus, Influenza B virus and a veterinary virus.

[0053] The disclosure provides recombinant RNA replicons comprising a picornavirus genome and a heterologous polynucleotide. In some embodiments, the heterologous polynucleotide is inserted between a 2A coding region and a 2B coding region. In some embodiments, the heterologous polynucleotide is inserted between a 5′ UTR and a 2A coding region. In some embodiments, the heterologous polynucleotide is inserted between a 3D coding region and a 3′ UTR. In some embodiments, the picornavirus is selected from a senecavirus, a cardiovirus, and an enterovirus.

### BRIEF DESCRIPTION OF THE DRAWINGS

[0054] FIG. 1 is a schematic depicting a wildtype SVV viral genome and an exemplary SVV derived recombinant RNA replicon.

[0055] FIG. 2 is a series of charts showing viral replication rate of SVV comprising heterologous polynucleotide of various lengths.

[0056] FIG. 3A is a schematic depicting various SVV derived recombinant RNA replicon constructs with mCherry reporter gene. FIG. 3B is a series of imaging figures showing the expression of mCherry in H1299 cells transected with the replicons.

[0057] FIG. 4A is a series of imaging figures showing the expression of mCherry in H1299 cells transected with the replicon Trunc5 and/or wildtype SVV viral genome. FIG. 4B contains charts showing the result of an IC50 assay in H446 cells for evaluation of viral titer.

[0058] FIG. 5A is a schematic depicting various SVV derived recombinant RNA replicon constructs with mCherry reporter gene. FIG. 5B is a gel image showing the result of in vitro T7 RNA synthesis. FIG. 5C is a series of imaging figures showing mCherry signal of cells transfected with each replicon.

[0059] FIG. 6A is a schematic depicting a wildtype SVV viral genome and an SVV derived recombinant RNA replicon carrying a mCherry reporter gene. FIG. 6B is a schematic depicting SVV derived recombinant RNA replicon Trunc10 carrying different reporter genes.

[0060] FIG. 7A is a schematic depicting an SVV-replicon Trunc10 carrying a transgene encoding murine IL-2 payload. FIG. 7B contains two charts showing the result of mIL-2 expression. FIG. 7C is a chart showing the result of RNA copy numbers analyzed by taqman assay.

[0061] FIG. 8A is a schematic depicting an SVV-replicon Trunc10 carrying a transgene encoding single chain mIL-12 (scmIL-12), with and without a signal sequence. FIG. 8B is a chart showing the result of RNA copy numbers analyzed by taqman assay. FIG. 8C contains two charts showing the expression of murine IL-12.

[0062] FIG. 9A is a schematic depicting SVV-replicons Trunc10 carrying a transgene encoding human IL-36γ, with the native signal sequence or with the IL2 signal sequence. FIG. 9B contains two charts showing the secretion of hIL-36γ after transfection or trans-encapsidation. FIG. 9C contains two charts showing the result of RNA copy numbers analyzed by taqman assay.

[0063] FIG. 10A is a schematic depicting bicistronic replicons incorporated with an encephalomyocarditis virus (EMCV) IRES downstream of a single payload. FIG. 10B is a chart showing the result of RNA copy numbers analyzed by taqman assay.

[0064] FIG. 11A is a schematic depicting dicistronic dual payload replicons incorporated with an encephalomyocarditis virus (EMCV) IRES downstream of multiple payloads separated by a furin-T2A site between the first payload and the second payload (eGFP). FIG. 11B is a series of images showing the expression of mCherry and GFP 24 hours post infection.

[0065] FIG. 12A is a schematic depicting a dual payload replicon incorporated with a second payload at the 3′ end of the replicon between the RdRp and the 3′UTR. FIG. 12B is a chart showing the secretion of hIL-36γ after transfection. FIG. 12C is a chart showing the result of RNA copy numbers analyzed by taqman assay.

[0066] FIG. 13A is an anti-His western blot that analyzes the expression of his-tagged 1DLT176-MTT10-DLL3-VHH-CD3 LiTE. FIG. 13B is a chart showing the result of RNA copy numbers analyzed by taqman assay.

[0067] FIG. 14A is an anti-His western blot that analyzes the expression of his-tagged rDLL3-αCD3-BiTE. FIG. 14B is a chart showing the result of RNA copy numbers analyzed by taqman assay.

[0068] FIG. 15A is a schematic depicting Trunc10 replicon comprising alternate cleavage peptides (3C, or furin-3C, or furinT2A) between his-tagged anti mFAP BiTE and CXCL10. FIG. 15B is a chart showing the result of expression of CXCL10. FIG. 15C is a chart showing the result of RNA copy numbers analyzed by taqman assay.

[0069] FIG. 16A is a schematic depicting Trunc10 replicon comprising alternate cleavage peptides (T2A, P2A, F2A, or E2A) between his-tagged anti-mFAP BiTE and CXCL10. FIG. 16B is a chart showing the result of expression of CXCL10. FIG. 16C is a chart showing the result of RNA copy numbers analyzed by taqman assay.

[0070] FIG. 17A is a schematic depicting a configuration of replicon polynucleotide encoding dual payload molecules operably linked by an IGSF1 polypeptide (SEQ ID NOs: 75 and 76). FIG. 17B is a chart showing the result of expression of IL-36γ. FIG. 17C is a chart showing the result of expression of IL-2. FIG. 17D is a chart showing the result of RNA copy numbers analyzed by taqman assay.

[0071] FIG. 18A is a schematic depicting schematic for HIV-1 protease mediated processing of two secreted payloads in the same open reading frame. FIG. 18B is a chart showing the result of RNA copy numbers analyzed by taqman assay. FIG. 18C contains two charts showing the result of expression of both payloads.

[0072] FIG. 19A is a schematic depicting a dual payload replicon comprising a BiTE and hIL-36γ. FIG. 19B is a chart showing expression of hIL-36γ. FIG. 19C is a chart showing the result of RNA copy numbers analyzed by taqman assay.

[0073] FIG. 20A is a schematic depicting a triple payload replicon T10-BiTE-IL3g6-IL2. FIG. 20B contains two charts showing the expression of hIL-36 and mIL-2. FIG. 20C is a chart showing the result of RNA copy numbers analyzed by taqman assay.

[0074] FIG. 21A is a schematic depicting an alternative design of triple payload replicon T10-mIL2-BiTE-hIL-36γ. FIG. 21B contains two charts showing the expression of hIL-36 and mIL-2. FIG. 21C is a chart showing the result of RNA copy numbers analyzed by taqman assay.

[0075] FIG. 22A is a schematic depicting another design of triple payload replicon T10-mIL2-hIL-36γ-BiTE. FIG. 22B is a chart showing the result of RNA copy numbers analyzed by taqman assay. FIG. 22C is a series of charts showing the expression of hIL-36 and mIL-2 in supernatant and lysate.

[0076] FIG. 23A is a chart showing the result of in vivo hIL-36γ expression in a NCI-H69 cells based mouse model. FIG. 23B is a chart showing the result of in vivo hIL-36γ expression in a NCI-H446 cells based mouse model.

[0077] FIG. 24 is a schematic depicting a wildtype coxsackievirus viral genome and an exemplary coxsackievirus derived recombinant RNA replicon carrying an mCherry reporter gene.

[0078] FIG. 25A is a series of images showing mCherry and GFP expression in cells transfected with the replicon and/or control vectors. FIG. 25B contains two images showing the expression of mCherry which demonstrates trans-encapsidation of the replicon in co-transfection with wildtype viral genome.

[0079] FIG. 26 is a diagram depicting the in vitro transcription process for an SVV derived replicon and a Neg-RNA. Autocatalytic cleavage of SVV derived replicon by 5′ and 3′ ribozyme (Rib) generate SVV derived replicon with discrete 5′ and 3′ ends required for replication. By contrast, Neg-RNA construct lacks ribozyme sequence and is not able of replication and virion production.

[0080] FIG. 27 is a diagram depicting the use of junctional cleavage sequences to remove non-viral RNA polynucleotides from the genome transcripts in order to maintain the native 5′ and 3′ discrete ends of the replicon.

[0081] FIGS. 28A-28B are schematics showing hammerhead ribozymes for generation of discrete 5′ termini. FIG. 28A is a schematic showing a structural model of a minimal hammerhead ribozyme (HHR) (SEQ ID NO: 108) that anneals and cleaves at the 5′ terminus at the arrow. FIG. 28B is a schematic showing a structural model of a ribozyme with a stabilized stem I (STBL) (SEQ ID NO: 109) for cleavage of 5′ terminus at the arrow.

[0082] FIGS. 29A-29B are schematics showing pistol ribozymes for generation of discrete 5′ termini. FIG. 29A is a schematic showing wild type Pistol ribozyme (SEQ ID NOs: 110, 111) characteristics. FIG. 29B is a schematic showing Pistol ribozyme from P. Polymyxa (SEQ ID NO: 112) with a tetraloop added to fuse the P3 strands modeled by mFOLD. The dashed box is the area mutagenized to retain the fold of the ribozyme in the context of the viral sequence. The “GUC” sequence shown in the dashed box was mutated to “UCA” to generate Pistol 1 and the “GUC” sequence was mutated to “TTA” to generate Pistol 2.

### DETAILED DESCRIPTION

[0083] Oncolytic viruses are replication-competent viruses with lytic life-cycle able to infect and lyse tumor cells. Direct tumor cell lysis results not only in cell death, but also the generation of an adaptive immune response against tumor antigens taken up and presented by local antigen presenting cells. Therefore, oncolytic viruses combat tumor cell growth through both direct cell lysis and by promoting antigen-specific adaptive responses capable of maintaining anti-tumor responses after viral clearance.

[0084] Oncolytic viruses can be genetically engineered to express payload molecules—e.g., by incorporating a heterologous polynucleotide that encodes a desirable payload protein into the viral genome. However, due to the packaging capability of the viral capsid proteins, only polynucleotides with a limited length can be incorporated into the full viral genome without compromising the replication rate, encapsidation, and/or function of the viruses. In addition, expression of multiple functional payload molecules from a single synthetic viral genome or viral replicon can be challenging. These limitations in the incorporation of payload molecules limit the use of viral therapeutics in the treatment of metastatic cancers.

[0085] There is a need in the art for oncolytic virus derived replicons comprising improved capacity for the incorporation of heterologous polynucleotides encoding payload molecules, which can be used in various therapeutics such as anti-cancer therapeutics. Heterologous sequences may encode one or more molecules that may be referred to herein as payload molecules. In some embodiments, payload sequences and payload molecules of the disclosure do not mediate a viral function. In some embodiments, payload sequences and payload molecules of the disclosure may be isolated from or derived from a species matching or homologous to the species of the subject or cell intended for administration of the viral replication for expression of the payload sequence or payload molecule. Heterologous sequences may encode one or more of a coding or a noncoding nucleic acid sequence, a DNA sequence, an RNA sequence, an amino acid sequence, a peptide, a polypeptide, a protein or any combination thereof.

[0086] The disclosure provides recombinant RNA replicons derived from picornaviral genomes that possess improved capability for the incorporation of heterologous polynucleotides encoding payload molecules. In some embodiments, the recombinant RNA replicons of the disclosure express two or more functional payload molecules from the same replicon. Exemplary configuration of replicons expressing two or more payload molecules are described. The present disclosure further provides particles comprising recombinant RNA replicons. In some embodiments, the particles further comprise full viral genome. In some embodiments, the recombinant RNA replicons can be trans-encapsidated by the capsid proteins expressed by the full viral genome. In some embodiments, contacting cells with said particles allows production of two groups of infectious viral particles, one comprising a recombinant RNA replicon, and the other comprising the full viral genome. In some embodiments, viral particles of both groups can infect cells together which allows continuous production of viral particles of both groups, either in vivo or in vitro. In some embodiments, the present disclosure provides recombinant RNA replicons and methods of use for the treatment and prevention of proliferative diseases and disorders (e.g., cancer). The present disclosure enables the systemic delivery of an efficacious recombinant RNA replicons suitable to treat a broad array of proliferative disorders (e.g., cancers).

[0087] The section headings used herein are for organizational purposes only and are not to be construed as limiting the subject matter described. All documents, or portions of documents, cited herein, including but not limited to patents, patent applications, articles, books, and treatises, are hereby expressly incorporated by reference in their entirety for any purpose. In the event that one or more of the incorporated documents or portions of documents define a term that contradicts that term's definition in the application, the definition that appears in this application controls. However, mention of any reference, article, publication, patent, patent publication, and patent application cited herein is not, and should not be taken as an acknowledgment, or any form of suggestion, that they constitute valid prior art or form part of the common general knowledge in any country in the world.

### Recombinant RNA Replicon

[0088] Picornavirus genomes follow a conserved 4-3-4 format, where the single polyprotein is cleaved by virally encoded proteases into the 5′ leader protein (present only in some species), four structural and seven (3+4) nonstructural proteins. Picornaviral genomes start with a 5′ untranslated region (UTR) and include the internal ribosome entry site (IRES). Adjacent to the IRES, the 5′ leader protein is a protease that sits at the 5′ extreme of the translated picornaviral polyprotein, though it is not present in all members of the Picornaviridae family. This is followed by the P1 region of the polyprotein, encoding in order the capsid proteins VP4, VP2, VP3 and VP1 respectively. These proteins are encoded by the VP4 coding region, the VP2 coding region, the VP3 coding region and the VP1 coding region, respectively (together, these four coding regions are called the “VP coding regions”). The P2 region of the translated polyprotein consists of 2A, 2B and 2C. The picornaviral 2A is a protein which can be absent, or in some cases present in more than one copy in the picornaviral genome. The final segment of the picornaviral polyprotein is P3, comprising 3A, 3B, 3C and 3D. The 3B, also known as VPg, is a small protein which associates with the 5′ terminus of the genome and plays an essential role in genome replication. The protease encoded by 3C performs most of the cleavages of the picornaviral polyprotein as well as inhibiting host transcription. Last among the picornaviral proteins is 3D, the RNA-dependent RNA polymerase (RdRp). The 3′ UTR of picornaviruses typically have a poly-A tail.

[0089] The present disclosure provides recombinant RNA replicons comprising a picornavirus genome, wherein the picornavirus genome comprises a deletion and/or a truncation in one or more coding regions. In some embodiments, the coding regions encodes structural proteins (VP4, VP2, VP3 and VP1). In some embodiments, the picornavirus genome of the replicon comprises a deletion of all of the VP coding regions. In some embodiments, the picornavirus genome of the replicon comprises deletions and/or truncations in each of the VP1, VP3 and VP2 coding regions. In some embodiments, the picornavirus genome of the replicon comprises deletions of the VP1 and VP3 coding regions and truncation of the VP2 coding region. In some embodiments, the deletions and truncations within the VP coding regions of the picornavirus genome comprise at least 500 bp, at least 1000 bp, at least 1500 bp, at least 2000 bp, at least 2500 bp, or at least 3000 bp. In some embodiments, the total deletions and truncations within the VP coding regions of the picornavirus genome is at least 2000 bp.

[0090] In some embodiments, the recombinant RNA replicons comprise one or more heterologous polynucleotide. In some embodiments, the heterologous polynucleotide is inserted into a site of the deletion or truncation. In some embodiments, the heterologous polynucleotide is inserted between a 2A coding region and a 2B coding region. In some embodiments, the heterologous polynucleotide is inserted between a 3D(RdRp) coding region and a 3′ untranslated region (UTR). In some embodiments, the one or more heterologous polynucleotides comprise at least 1000 bp, at least 2000 bp, or at least 3000 bp.

[0091] In some embodiments, the picornavirus genome is selected from a senecavirus genome, a cardiovirus genome, an enterovirus genome, and an aphthovirus genome. In some embodiments, the viral genome is derived from a picornavirus selected from a Cardiovirus, a Cosavirus, an Enterovirus, a Hepatovirus, a Kobuvirus, a Parechovirus, a Rosavirus, a Salivirus, a Pasivirus, a Senecavirus, and a chimeric viral genome thereof. In some embodiments, the viral genome is derived from a picornavirus selected from Human Rhinovirus, HRV (SEQ ID NO: 5; GenBank accession No. K02121.1), Poliovirus, PV (SEQ ID NO: 6; GenBank accession No. AF111984.2), Coxsackievirus A, CVA (SEQ ID NO: 7; GenBank accession No. AF546702.1), Bovine Enterovirus, BEV (SEQ ID NO: 8; GenBank accession No. NC_001859.1), Enterovirus 71, EV71 (SEQ ID NO: 9; GenBank accession No. KJ686308.1), Echovirus, ECHO (SEQ ID NO: 10; GenBank accession No. AF029859.2), Foot-and-Mouth virus, FMDV (SEQ ID NO: 11; GenBank accession No. DQ989323.1), Seneca Valley virus, SVV (SEQ ID NO: 12; GenBank accession No. NC_011349.1), Theiler's Murine Encephalomyelitis virus, TMEV (SEQ ID NO: 13; GenBank accession No. M20301.1), Mengovirus, MEV (SEQ ID NO: 14; GenBank accession No. L22089.1), Encephalomyocarditis, EMCV (SEQ ID NO: 15; GenBank accession No. X74312.1)-the NCBI GenBank Accession No. of each virus is indicated in the parenthesis. In some embodiments, the picornavirus genome is a seneca valley virus genome. In some embodiments, the picornavirus genome is a coxsackievirus genome. In some embodiments, the picornavirus genome is an encephalomyocarditis virus genome. In some embodiments, the picornavirus genome is a poliovirus genome (including a chimeric polio virus such as PVS-RIPO).

[0092] In some embodiments, the recombinant RNA replicons described herein comprises a chimeric picornavirus genome (e.g., a viral genome comprising one portion, such as a capsid protein or an IRES, that is derived from a first picornavirus, and another portion, such as a non-structural protease or polymerase coding region derived from a second picornavirus).

[0093] In some embodiments, the recombinant RNA replicon retains competency for positive and/or negative strand RNA synthesis. In some embodiments, the rate of positive and/or negative strand RNA synthesis of the recombinant RNA replicon is at least 1%, at least 5%, at least 10%, at least 20%, at least 30%, at least 40%, at least 50%, at least 60%, at least 70%, at least 80%, at least 90%, or at least 100% of the rate of synthesis of the corresponding wild type viral genome.

[0094] In some embodiments, the recombinant RNA replicon retains a viral replication rate that is comparable to the wildtype viral genome. In some embodiments, the viral replication rate of the recombinant RNA replicon is at least 1%, at least 5%, at least 10%, at least 20%, at least 30%, at least 40%, at least 50%, at least 60%, at least 70%, at least 80%, at least 90%, or at least 100% of the viral replication rate of the corresponding wildtype viral genome.

[0095] In some embodiments, the recombinant RNA replicon is provided as a recombinant ribonucleic acid (RNA). In some embodiments, the recombinant RNA replicons comprise one or more nucleic acid analogues. Examples of nucleic acid analogues include 2′-O-methyl-substituted RNA, 2′-O-methoxy-ethyl bases, 2′ Fluoro bases, locked nucleic acids (LNAs), unlocked nucleic acids (UNA), bridged nucleic acids (BNA), morpholinos, and peptide nucleic acids (PNA). In some embodiments, the recombinant RNA replicon is a circular RNA molecule (circRNA) or a single stranded RNA (ssRNA). In some embodiments, the single-stranded RNA is a positive sense or negative sense strand.

[0096] In some embodiments, the recombinant RNA replicon is a circular RNA molecule (circRNA). CircRNA molecules lack the free ends necessary for exonuclease mediated degradation, thus extending the half-life of the RNA molecule and enabling more stable protein production over time. In order to produce a functional RNA replicon from a circRNA molecule, it is necessary to “break open” the circular construct once inside a cell so that the linear RNA replicon with the appropriate 3′ and 5′ native ends can be produced. Therefore, in some embodiments, the recombinant RNA replicon is provided as a circRNA molecule and further comprises one or more additional RNA sequences that facilitate the linearization of the circRNA molecule inside a cell. Examples of such additional RNA sequences include siRNA target sites, miRNA target sites, and guide RNA target sites. The corresponding siRNA, miRNA, or gRNA can be co-formulated with the circRNA molecule. Alternatively, the miRNA target site can be selected based on the expression of the cognate miRNA in a target cell, such that cleavage of the circRNA molecule and replication of the replicon is limited to target cells expressing a particular miRNA.

### Recombinant SVV Replicon

[0097] The disclosure provides recombinant RNA replicons comprising a Seneca Valley Virus (SVV) viral genome, wherein the SVV genome comprises a deletion or a truncation in one or more SVV protein coding regions. In some embodiments, the replicon comprises a heterologous polynucleotide.

[0098] In some embodiments, the SVV genome is selected from a wild-type SVV genome (such as SVV-A, SEQ ID NO: 1) or a mutant SVV genome (such as SVV-IR2, SEQ ID NO: 2). In some embodiments, the recombinant RNA replicon of the disclosure comprises a chimeric SVV genome.

[0099] For SVV viral genome, the VP4 coding region encompasses nucleotide 904 to nucleotide 1116 according to SEQ ID NO: 1. The VP2 coding region encompasses nucleotide 1117 to nucleotide 1968 according to SEQ ID NO: 1. The VP3 coding region encompasses nucleotide 1969 to nucleotide 2685 according to SEQ ID NO: 1. The VP1 coding region encompasses nucleotide 2686 to nucleotide 3477 according to SEQ ID NO: 1. The 2A coding region encompasses nucleotide 3478 to nucleotide 3504 according to SEQ ID NO: 1. The 2B coding region encompasses nucleotide 3505 to nucleotide 3888 according to SEQ ID NO: 1.

[0100] In some embodiments, the SVV genome of the replicon comprises deletions and/or truncations in one or more VP coding regions. In some embodiments, the replicons described herein are administered to subjects in combination with a synthetic viral genome. Without wishing to be bound by any particular theory, it is thought that deleting and/or truncating the VP coding regions in the replicon will: 1) facilitate accommodation of larger payload cassettes than the virus itself and/or 2) render the replicon by itself incapable of cell to cell spread.

[0101] In some embodiments, one, or at least one of the VP4, VP2, VP3 and VP1 coding regions are deleted and/or truncated. In some embodiments, two, or at least two, of the VP coding regions comprising VP4, VP2, VP3 and VP1 are deleted and/or truncated. In some embodiments, two, or at least two, of the VP coding regions comprising VP2, VP3 and VP1 are deleted and/or truncated. In some embodiments, three, or at least three, of the VP coding regions comprising VP4, VP2, VP3 and VP1 are deleted and/or truncated. In some embodiments, all of the VP4, VP2, VP3 and VP1 coding regions are deleted and/or truncated. In some embodiments, the VP2 coding region is truncated and one of the VP3 coding region and the VP1 coding region is deleted or truncated. In some embodiments, the VP2 coding region is truncated and both the VP3 and VP1 coding regions are deleted and/or truncated. In some embodiments, the SVV genome of the replicon comprises a deletion and/or truncation of each of the VP1, VP3 and VP2 coding regions. In some embodiments, the SVV genome of the replicon comprises a deletion of the VP1 and VP3 coding regions and a truncation of the VP2 coding region. In some embodiments, the SVV genome of the replicon comprises one or more deletions or truncations in the VP2-VP3-VP1 region following one of the patterns listed in Table 1 below.

TABLE 1
Pattern of Deletion or Truncation in the
VP2-VP3-VP1 Region of SVV Genome

| Pattern**\ | | | |
|---|---|---|---|
| coding region | VP2 | VP3 | VP1 |
| 1 | T | N | N |
| 2 | T | N | T |
| 3 | T | N | D |
| 4 | T | T | N |
| 5 | T | T | T |
| 6 | T | T | D |
| 7 | T | D | N |
| 8 | T | D | T |
| 9 | T | D | D |
| 10 | N | N | N |
| 11 | N | N | T |
| 12 | N | N | D |
| 13 | N | T | N |
| 14 | N | T | T |
| 15 | N | T | D |
| 16 | N | D | N |
| 17 | N | D | T |
| 18 | N | D | D |

**“D” indicates deletion; “T” indicates truncation; “N” indicates no truncation or deletion.

[0102] In some embodiments, the SVV genome of the replicon comprises, consists essentially of, or consists of, one or more deletions or truncations of the SVV genome within the region corresponding to nucleotide 1261 to nucleotide 3477, inclusive of the endpoints, according to SEQ ID NO: 1 and FIG. 1. In some embodiments, the SVV genome of the replicon comprises a deletion of the SVV genome region corresponding to nucleotide 1261 to nucleotide 3477, inclusive of the endpoints, according to SEQ ID NO: 1. In some embodiments, the replicon comprises one or more deletions or truncations within the region corresponding to nucleotide 1407 to nucleotide 3477 according to SEQ ID NO: 1. In some embodiments, the replicon comprises one or more deletions or truncations within the region corresponding to nucleotide 1599 to nucleotide 3477 according to SEQ ID NO: 1. In some embodiments, the replicon comprises one or more deletions or truncations within the region corresponding to nucleotide 1683 to nucleotide 3477 according to SEQ ID NO: 1. In some embodiments, the replicon comprises one or more deletions or truncations within the region corresponding to nucleotide 1924 to nucleotide 3477 according to SEQ ID NO: 1. In some embodiments, the replicon comprises one or more deletions or truncations within the region corresponding to nucleotide 2467 to nucleotide 3477 according to SEQ ID NO: 1. In some embodiments, the replicon comprises one or more deletions or truncations within the region corresponding to nucleotide 1261 to nucleotide 3300 according to SEQ ID NO: 1. In some embodiments, the replicon comprises one or more deletions or truncations within the region corresponding to nucleotide 1261 to nucleotide 3000 according to SEQ ID NO: 1. In some embodiments, the replicon comprises one or more deletions or truncations within the region corresponding to nucleotide 1261 to nucleotide 2700 according to SEQ ID NO: 1. In some embodiments, the replicon comprises one or more deletions or truncations within the region corresponding to nucleotide 1261 to nucleotide 2400 according to SEQ ID NO: 1. In some embodiments, the replicon comprises one or more deletions or truncations within the region corresponding to nucleotide 1261 to nucleotide 2100 according to SEQ ID NO: 1. All ranges are inclusive of the endpoints.

[0103] In some embodiments, each of the deletion or the truncation comprises 1 or more nucleotides. In some embodiments, each of the deletion or the truncation comprises 10 or more nucleotides. In some embodiments, each of the deletion or the truncation comprises 50 or more nucleotides. In some embodiments, each of the deletion or the truncation comprises 100 or more nucleotides. In some embodiments, each of the deletion or the truncation comprises 500 or more nucleotides. In some embodiments, each of the deletion or the truncation comprises 1000 or more nucleotides.

[0104] In some embodiments, the one or more deletions or truncations comprise at least 500 bp, at least 600 bp, at least 700 bp, at least 800 bp, at least 900 bp, at least 1000 bp, at least 1100 bp, at least 1200 bp, at least 1300 bp, at least 1400 bp, at least 1500 bp, at least 1600 bp, at least 1700 bp, at least 1800 bp, at least 1900 bp, at least 2000 bp, at least 2100 bp, or at least 2200 bp of nucleotides in total. In some embodiments, the one or more deletions or truncations consist of 500 bp, 600 bp, 700 bp, 800 bp, 900 bp, 1000 bp, 1100 bp, 1200 bp, 1300 bp, 1400 bp, 1500 bp, 1600 bp, 1700 bp, 1800 bp, 1900 bp, 2000 bp, 2100 bp, 2200 bp, 2300 bp, 2400 bp, or any values in between, of nucleotides in total. In some embodiments, the one or more deletions or truncations consist of between 500-2400 bp, between 500-2300 bp, between 500-2200 bp, between 500-2000 bp, between 500-1500 bp, between 500-1000 bp, between 1000-2300 bp, between 1000-2200 bp, between 1000-2000 bp, between 1000-1500 bp, between 1500-2300 bp, between 1500-2200 bp, between 1500-2000 bp, between 2000-2300 bp, or between 2000-2200 bp of nucleotides in total. All ranges are inclusive of the endpoints.

[0105] In some embodiments, the SVV genome of the replicon comprises a 5′ UTR. In some embodiments, the SVV genome of the replicon comprises a 5′ leader protein coding sequence. In some embodiments, the SVV genome of the replicon comprises a non-truncated VP4 coding region. In some embodiments, the SVV genome of the replicon comprises a VP2 coding region or a truncation thereof.

[0106] In some embodiments, the SVV genome of the replicon comprises, from 5′ to 3′, a 5′ leader protein coding sequence, a VP4 coding region, and a VP2 coding region or a truncation thereof. In some embodiments, a portion of the SVV genome of the replicon comprising the 5′ UTR, the 5′ leader protein coding sequence, the VP4 coding region and the VP2 coding region or a truncation thereof has at least 70%, at least 75%, at least 80%, at least 85%, at least 90%, at least 93%, at least 95%, at least 97%, at least 98%, at least 99%, at least 99.5%, or 100% sequence identity to nucleotide 1 to 1260 of SEQ ID NO: 1 or SEQ ID NO: 2. In some embodiments, a portion of the SVV genome of the replicon comprising the 5′ UTR, the 5′ leader protein coding sequence, the VP4 coding region and the VP2 coding region or a truncation thereof has about 70%, about 75%, about 80%, about 85%, about 90%, about 93%, about 95%, about 97%, about 98%, about 99%, about 99.5%, or 100% sequence identity to nucleotide 1 to 1260 of SEQ ID NO: 1 or SEQ ID NO: 2. In some embodiments, a portion of the SVV genome of the replicon comprising the 5′ UTR, the 5′ leader protein coding sequence, the VP4 coding region and the VP2 coding region or a truncation thereof has at most 1, at most 5, at most 10, or at most 20 nucleotide mutations according to nucleotide 1 to 1260 of SEQ ID NO: 1 or SEQ ID NO: 2.

[0107] In some embodiments, the SVV genome of the replicon comprises a 5′ portion of the VP2 coding region. In some embodiments, the 5′ portion of the endogenous VP2 coding region is at least 50 bp, at least 60 bp, at least 70 bp, at least 80 bp, at least 90 bp, at least 100 bp, at least 110 bp, at least 120 bp, at least 130 bp, at least 140 bp, or at least 145 bp in length. In some embodiments, the 5′ portion of the endogenous VP2 coding region comprises about 50 bp, about 60 bp, about 70 bp, about 80 bp, about 90 bp, about 100 bp, about 110 bp, about 120 bp, about 130 bp, about 140 bp, about 145 bp, or any value in between. In some embodiments, the 5′ portion of the endogenous VP2 coding region is less than 50 bp, less than 60 bp, less than 70 bp, less than 80 bp, less than 90 bp, less than 100 bp, less than 110 bp, less than 120 bp, less than 130 bp, less than 140 bp, or less than 145 bp in length. All ranges are inclusive of the endpoints.

[0108] In some embodiments, the SVV genome of the replicon comprises a cis-acting replication element (CRE). In some embodiments, the VP2 coding region or a truncation thereof of the SVV genome of the replicon comprises a CRE. In some embodiments, the region in the SVV genome of the replicon comprising a VP4 coding region and a VP2 coding region or a truncation thereof comprises a CRE.

[0109] In some embodiments, the CRE comprises about 10 bp, about 20 bp, about 30 bp, about 40 bp, about 50 bp, about 60 bp, about 70 bp, about 80 bp, about 90 bp, about 100 bp, about 110 bp, about 120 bp, about 130 bp, about 140 bp, about 150 bp, about 160 bp, about 170 bp, about 180 bp, about 190 bp, about 200 bp, or any value in between, of nucleotides. In some embodiments, the CRE comprises at least 10 bp, at least 20 bp, at least 30 bp, at least 40 bp, at least 50 bp, at least 60 bp, at least 70 bp, at least 80 bp, at least 90 bp, at least 100 bp, at least 110 bp, at least 120 bp, at least 130 bp, at least 140 bp, at least 150 bp, at least 160 bp, at least 170 bp, at least 180 bp, at least 190 bp, or at least 200 bp, of nucleotides. In some embodiments, the CRE comprises between 10-200 bp, between 10-150 bp, between 10-100 bp, between 10-75 bp, between 10-60 bp, between 10-50 bp, between 20-200 bp, between 20-150 bp, between 20-100 bp, between 20-75 bp, between 20-60 bp, between 20-50 bp, between 30-200 bp, between 30-150 bp, between 30-100 bp, between 30-75 bp, between 30-60 bp, between 30-50 bp, between 40-200 bp, between 40-150 bp, between 40-100 bp, between 40-75 bp, between 40-60 bp, between 40-50 bp, between 50-200 bp, between 50-150 bp, between 50-100 bp, between 50-75 bp, or between 50-60 bp, of nucleotides. All ranges are inclusive of the endpoints.

[0110] In some embodiments, the CRE comprises one or more nucleotides within the region corresponding to nucleotide 1000 to nucleotide 1260 according to SEQ ID NO: 1. In some embodiments, the CRE comprises one or more nucleotides within the region corresponding to nucleotide 1000 to nucleotide 1260, nucleotide 1050 to nucleotide 1260, nucleotide 1100 to nucleotide 1260, nucleotide 1150 to nucleotide 1260, nucleotide 1200 to nucleotide 1260, nucleotide 1000 to nucleotide 1250, nucleotide 1050 to nucleotide 1250, nucleotide 1100 to nucleotide 1250, nucleotide 1150 to nucleotide 1250, nucleotide 1200 to nucleotide 1250, nucleotide 1000 to nucleotide 1200, nucleotide 1050 to nucleotide 1200, nucleotide 1100 to nucleotide 1200, nucleotide 1150 to nucleotide 1200, nucleotide 1000 to nucleotide 1150, nucleotide 1050 to nucleotide 1150, nucleotide 1100 to nucleotide 1150, nucleotide 1000 to nucleotide 1100, or nucleotide 1050 to nucleotide 1100, according to SEQ ID NO: 1. In some embodiments, the CRE is located within the region corresponding to nucleotide 1000 to nucleotide 1260, nucleotide 1050 to nucleotide 1260, nucleotide 1100 to nucleotide 1260, nucleotide 1150 to nucleotide 1260, nucleotide 1200 to nucleotide 1260, nucleotide 1000 to nucleotide 1250, nucleotide 1050 to nucleotide 1250, nucleotide 1100 to nucleotide 1250, nucleotide 1150 to nucleotide 1250, nucleotide 1200 to nucleotide 1250, nucleotide 1000 to nucleotide 1200, nucleotide 1050 to nucleotide 1200, nucleotide 1100 to nucleotide 1200, nucleotide 1150 to nucleotide 1200, nucleotide 1000 to nucleotide 1150, nucleotide 1050 to nucleotide 1150, nucleotide 1100 to nucleotide 1150, nucleotide 1000 to nucleotide 1100, or nucleotide 1050 to nucleotide 1100, according to SEQ ID NO: 1. All ranges are inclusive of the endpoints.

[0111] In some embodiments, the CRE comprises one or more nucleotides within the region corresponding to nucleotide 1000 to nucleotide 1260 according to SEQ ID NO: 1. In some embodiments, the CRE comprises the polynucleotide sequence corresponding to nucleotide 1000 to nucleotide 1260, nucleotide 1050 to nucleotide 1260, nucleotide 1100 to nucleotide 1260, nucleotide 1150 to nucleotide 1260, nucleotide 1200 to nucleotide 1260, nucleotide 1000 to nucleotide 1250, nucleotide 1050 to nucleotide 1250, nucleotide 1100 to nucleotide 1250, nucleotide 1150 to nucleotide 1250, nucleotide 1200 to nucleotide 1250, nucleotide 1000 to nucleotide 1200, nucleotide 1050 to nucleotide 1200, nucleotide 1100 to nucleotide 1200, nucleotide 1150 to nucleotide 1200, nucleotide 1000 to nucleotide 1150, nucleotide 1050 to nucleotide 1150, nucleotide 1100 to nucleotide 1150, nucleotide 1000 to nucleotide 1100, or nucleotide 1050 to nucleotide 1100, of SEQ ID NO: 1. In some embodiments, the CRE comprises a polynucleotide sequence having at least 70%, at least 75%, at least 80%, at least 85%, at least 90%, at least 95%, at least 96%, at least 97%, at least 98%, at least 99%, or 100% identity to the polynucleotide sequence corresponding to nucleotide 1000 to nucleotide 1260, nucleotide 1050 to nucleotide 1260, nucleotide 1100 to nucleotide 1260, nucleotide 1150 to nucleotide 1260, nucleotide 1200 to nucleotide 1260, nucleotide 1000 to nucleotide 1250, nucleotide 1050 to nucleotide 1250, nucleotide 1100 to nucleotide 1250, nucleotide 1150 to nucleotide 1250, nucleotide 1200 to nucleotide 1250, nucleotide 1000 to nucleotide 1200, nucleotide 1050 to nucleotide 1200, nucleotide 1100 to nucleotide 1200, nucleotide 1150 to nucleotide 1200, nucleotide 1000 to nucleotide 1150, nucleotide 1050 to nucleotide 1150, nucleotide 1100 to nucleotide 1150, nucleotide 1000 to nucleotide 1100, or nucleotide 1050 to nucleotide 1100, of SEQ ID NO: 1. All ranges are inclusive of the endpoints.

[0112] In some embodiments, the CRE comprises one or more nucleotides within the region corresponding to nucleotide 1117 to nucleotide 1260 according to SEQ ID NO: 1. The polynucleotide sequence of this CRE region is represented by SEQ ID NO: 149. In some embodiments, the CRE comprises a polynucleotide sequence having at least 70%, at least 75%, at least 80%, at least 85%, at least 90%, at least 95%, at least 96%, at least 97%, at least 98%, at least 99%, or 100% identity to SEQ ID NO: 149. In some embodiments, the CRE comprises a polynucleotide sequence having at least 70%, at least 75%, at least 80%, at least 85%, at least 90%, at least 95%, at least 96%, at least 97%, at least 98%, at least 99%, or 100% identity to a 10 consecutive nucleotide segment of SEQ ID NO: 149. In some embodiments, the CRE comprises a polynucleotide sequence having at least 70%, at least 75%, at least 80%, at least 85%, at least 90%, at least 95%, at least 96%, at least 97%, at least 98%, at least 99%, or 100% identity to a 20 consecutive nucleotide segment of SEQ ID NO: 149. In some embodiments, the CRE comprises a polynucleotide sequence having at least 70%, at least 75%, at least 80%, at least 85%, at least 90%, at least 95%, at least 96%, at least 97%, at least 98%, at least 99%, or 100% identity to a 30 consecutive nucleotide segment of SEQ ID NO: 149. In some embodiments, the CRE comprises a polynucleotide sequence having at least 70%, at least 75%, at least 80%, at least 85%, at least 90%, at least 95%, at least 96%, at least 97%, at least 98%, at least 99%, or 100% identity to a 40 consecutive nucleotide segment of SEQ ID NO: 149. In some embodiments, the CRE comprises a polynucleotide sequence having at least 70%, at least 75%, at least 80%, at least 85%, at least 90%, at least 95%, at least 96%, at least 97%, at least 98%, at least 99%, or 100% identity to a 50 consecutive nucleotide segment of SEQ ID NO: 149. In some embodiments, the CRE comprises a polynucleotide sequence having at least 70%, at least 75%, at least 80%, at least 85%, at least 90%, at least 95%, at least 96%, at least 97%, at least 98%, at least 99%, or 100% identity to a 60 consecutive nucleotide segment of SEQ ID NO: 149. In some embodiments, the CRE comprises a polynucleotide sequence having at least 70%, at least 75%, at least 80%, at least 85%, at least 90%, at least 95%, at least 96%, at least 97%, at least 98%, at least 99%, or 100% identity to a 70 consecutive nucleotide segment of SEQ ID NO: 149. In some embodiments, the CRE comprises a polynucleotide sequence having at least 70%, at least 75%, at least 80%, at least 85%, at least 90%, at least 95%, at least 96%, at least 97%, at least 98%, at least 99%, or 100% identity to a 80 consecutive nucleotide segment of SEQ ID NO: 149. In some embodiments, the CRE comprises a polynucleotide sequence having at least 70%, at least 75%, at least 80%, at least 85%, at least 90%, at least 95%, at least 96%, at least 97%, at least 98%, at least 99%, or 100% identity to a 90 consecutive nucleotide segment of SEQ ID NO: 149. In some embodiments, the CRE comprises a polynucleotide sequence having at least 70%, at least 75%, at least 80%, at least 85%, at least 90%, at least 95%, at least 96%, at least 97%, at least 98%, at least 99%, or 100% identity to a 100 consecutive nucleotide segment of SEQ ID NO: 149. In some embodiments, the CRE comprises a polynucleotide sequence having at least 70%, at least 75%, at least 80%, at least 85%, at least 90%, at least 95%, at least 96%, at least 97%, at least 98%, at least 99%, or 100% identity to a 110 consecutive nucleotide segment of SEQ ID NO: 149. In some embodiments, the CRE comprises a polynucleotide sequence having at least 70%, at least 75%, at least 80%, at least 85%, at least 90%, at least 95%, at least 96%, at least 97%, at least 98%, at least 99%, or 100% identity to a 120 consecutive nucleotide segment of SEQ ID NO: 149. In some embodiments, the CRE comprises a polynucleotide sequence having at least 70%, at least 75%, at least 80%, at least 85%, at least 90%, at least 95%, at least 96%, at least 97%, at least 98%, at least 99%, or 100% identity to a 130 consecutive nucleotide segment of SEQ ID NO: 149. In some embodiments, the CRE comprises a polynucleotide sequence having at least 70%, at least 75%, at least 80%, at least 85%, at least 90%, at least 95%, at least 96%, at least 97%, at least 98%, at least 99%, or 100% identity to a 140 consecutive nucleotide segment of SEQ ID NO: 149.

[0113] In some embodiments, the SVV genome of the replicon comprises one or more deletions or truncations of the SVV genome within the region corresponding to nucleotide 1261 to nucleotide 3477, inclusive of the endpoints and according to the numbering of SEQ ID NO: 1, wherein the one or more deletions or truncations comprise at least 500 bp in total, and wherein the SVV genome of the replicon comprises a CRE polynucleotide sequence having at least 70%, at least 75%, at least 80%, at least 85%, at least 90%, at least 95%, at least 96%, at least 97%, at least 98%, at least 99%, or 100% identity to SEQ ID NO: 149. In some embodiments, the SVV genome of the replicon comprises one or more deletions or truncations of the SVV genome within the region corresponding to nucleotide 1261 to nucleotide 3477, inclusive of the endpoints and according to the numbering of SEQ ID NO: 1, wherein the one or more deletions or truncations comprise at least 600 bp in total, and wherein the SVV genome of the replicon comprises a CRE polynucleotide sequence having at least 70%, at least 75%, at least 80%, at least 85%, at least 90%, at least 95%, at least 96%, at least 97%, at least 98%, at least 99%, or 100% identity to SEQ ID NO: 149. In some embodiments, the SVV genome of the replicon comprises one or more deletions or truncations of the SVV genome within the region corresponding to nucleotide 1261 to nucleotide 3477, inclusive of the endpoints and according to the numbering of SEQ ID NO: 1, wherein the one or more deletions or truncations comprise at least 700 bp in total, and wherein the SVV genome of the replicon comprises a CRE polynucleotide sequence having at least 70%, at least 75%, at least 80%, at least 85%, at least 90%, at least 95%, at least 96%, at least 97%, at least 98%, at least 99%, or 100% identity to SEQ ID NO: 149. In some embodiments, the SVV genome of the replicon comprises one or more deletions or truncations of the SVV genome within the region corresponding to nucleotide 1261 to nucleotide 3477, inclusive of the endpoints and according to the numbering of SEQ ID NO: 1, wherein the one or more deletions or truncations comprise at least 800 bp in total, and wherein the SVV genome of the replicon comprises a CRE polynucleotide sequence having at least 70%, at least 75%, at least 80%, at least 85%, at least 90%, at least 95%, at least 96%, at least 97%, at least 98%, at least 99%, or 100% identity to SEQ ID NO: 149. In some embodiments, the SVV genome of the replicon comprises one or more deletions or truncations of the SVV genome within the region corresponding to nucleotide 1261 to nucleotide 3477, inclusive of the endpoints and according to the numbering of SEQ ID NO: 1, wherein the one or more deletions or truncations comprise at least 900 bp in total, and wherein the SVV genome of the replicon comprises a CRE polynucleotide sequence having at least 70%, at least 75%, at least 80%, at least 85%, at least 90%, at least 95%, at least 96%, at least 97%, at least 98%, at least 99%, or 100% identity to SEQ ID NO: 149. In some embodiments, the SVV genome of the replicon comprises one or more deletions or truncations of the SVV genome within the region corresponding to nucleotide 1261 to nucleotide 3477, inclusive of the endpoints and according to the numbering of SEQ ID NO: 1, wherein the one or more deletions or truncations comprise at least 1000 bp in total, and wherein the SVV genome of the replicon comprises a CRE polynucleotide sequence having at least 70%, at least 75%, at least 80%, at least 85%, at least 90%, at least 95%, at least 96%, at least 97%, at least 98%, at least 99%, or 100% identity to SEQ ID NO: 149. In some embodiments, the SVV genome of the replicon comprises one or more deletions or truncations of the SVV genome within the region corresponding to nucleotide 1261 to nucleotide 3477, inclusive of the endpoints and according to the numbering of SEQ ID NO: 1, wherein the one or more deletions or truncations comprise at least 1100 bp in total, and wherein the SVV genome of the replicon comprises a CRE polynucleotide sequence having at least 70%, at least 75%, at least 80%, at least 85%, at least 90%, at least 95%, at least 96%, at least 97%, at least 98%, at least 99%, or 100% identity to SEQ ID NO: 149. In some embodiments, the SVV genome of the replicon comprises one or more deletions or truncations of the SVV genome within the region corresponding to nucleotide 1261 to nucleotide 3477, inclusive of the endpoints, and according to the numbering of SEQ ID NO: 1, wherein the one or more deletions or truncations comprise at least 1200 bp in total, and wherein the SVV genome of the replicon comprises a CRE polynucleotide sequence having at least 70%, at least 75%, at least 80%, at least 85%, at least 90%, at least 95%, at least 96%, at least 97%, at least 98%, at least 99%, or 100% identity to SEQ ID NO: 149. In some embodiments, the SVV genome of the replicon comprises one or more deletions or truncations of the SVV genome within the region corresponding to nucleotide 1261 to nucleotide 3477, inclusive of the endpoints, and according to the numbering of SEQ ID NO: 1, wherein the one or more deletions or truncations comprise at least 1300 bp in total, and wherein the SVV genome of the replicon comprises a CRE polynucleotide sequence having at least 70%, at least 75%, at least 80%, at least 85%, at least 90%, at least 95%, at least 96%, at least 97%, at least 98%, at least 99%, or 100% identity to SEQ ID NO: 149. In some embodiments, the SVV genome of the replicon comprises one or more deletions or truncations of the SVV genome within the region corresponding to nucleotide 1261 to nucleotide 3477, inclusive of the endpoints, and according to the numbering of SEQ ID NO: 1, wherein the one or more deletions or truncations comprise at least 1400 bp in total, and wherein the SVV genome of the replicon comprises a CRE polynucleotide sequence having at least 70%, at least 75%, at least 80%, at least 85%, at least 90%, at least 95%, at least 96%, at least 97%, at least 98%, at least 99%, or 100% identity to SEQ ID NO: 149. In some embodiments, the SVV genome of the replicon comprises one or more deletions or truncations of the SVV genome within the region corresponding to nucleotide 1261 to nucleotide 3477, inclusive of the endpoints, and according to the numbering of SEQ ID NO: 1, wherein the one or more deletions or truncations comprise at least 1500 bp in total, and wherein the SVV genome of the replicon comprises a CRE polynucleotide sequence having at least 70%, at least 75%, at least 80%, at least 85%, at least 90%, at least 95%, at least 96%, at least 97%, at least 98%, at least 99%, or 100% identity to SEQ ID NO: 149. In some embodiments, the SVV genome of the replicon comprises one or more deletions or truncations of the SVV genome within the region corresponding to nucleotide 1261 to nucleotide 3477, inclusive of the endpoints, and according to the numbering of SEQ ID NO: 1, wherein the one or more deletions or truncations comprise at least 1600 bp in total, and wherein the SVV genome of the replicon comprises a CRE polynucleotide sequence having at least 70%, at least 75%, at least 80%, at least 85%, at least 90%, at least 95%, at least 96%, at least 97%, at least 98%, at least 99%, or 100% identity to SEQ ID NO: 149. In some embodiments, the SVV genome of the replicon comprises one or more deletions or truncations of the SVV genome within the region corresponding to nucleotide 1261 to nucleotide 3477, inclusive of the endpoints, and according to the numbering of SEQ ID NO: 1, wherein the one or more deletions or truncations comprise at least 1700 bp in total, and wherein the SVV genome of the replicon comprises a CRE polynucleotide sequence having at least 70%, at least 75%, at least 80%, at least 85%, at least 90%, at least 95%, at least 96%, at least 97%, at least 98%, at least 99%, or 100% identity to SEQ ID NO: 149. In some embodiments, the SVV genome of the replicon comprises one or more deletions or truncations of the SVV genome within the region corresponding to nucleotide 1261 to nucleotide 3477, inclusive of the endpoints, and according to the numbering of SEQ ID NO: 1, wherein the one or more deletions or truncations comprise at least 1800 bp in total, and wherein the SVV genome of the replicon comprises a CRE polynucleotide sequence having at least 70%, at least 75%, at least 80%, at least 85%, at least 90%, at least 95%, at least 96%, at least 97%, at least 98%, at least 99%, or 100% identity to SEQ ID NO: 149. In some embodiments, the SVV genome of the replicon comprises one or more deletions or truncations of the SVV genome within the region corresponding to nucleotide 1261 to nucleotide 3477, inclusive of the endpoints, and according to the numbering of SEQ ID NO: 1, wherein the one or more deletions or truncations comprise at least 1900 bp in total, and wherein the SVV genome of the replicon comprises a CRE polynucleotide sequence having at least 70%, at least 75%, at least 80%, at least 85%, at least 90%, at least 95%, at least 96%, at least 97%, at least 98%, at least 99%, or 100% identity to SEQ ID NO: 149. In some embodiments, the SVV genome of the replicon comprises one or more deletions or truncations of the SVV genome within the region corresponding to nucleotide 1261 to nucleotide 3477, inclusive of the endpoints, and according to the numbering of SEQ ID NO: 1, wherein the one or more deletions or truncations comprise at least 2000 bp in total, and wherein the SVV genome of the replicon comprises a CRE polynucleotide sequence having at least 70%, at least 75%, at least 80%, at least 85%, at least 90%, at least 95%, at least 96%, at least 97%, at least 98%, at least 99%, or 100% identity to SEQ ID NO: 149. In some embodiments, the SVV genome of the replicon comprises one or more deletions or truncations of the SVV genome within the region corresponding to nucleotide 1261 to nucleotide 3477, inclusive of the endpoints, and according to the numbering of SEQ ID NO: 1, wherein the one or more deletions or truncations comprise at least 2100 bp in total, and wherein the SVV genome of the replicon comprises a CRE polynucleotide sequence having at least 70%, at least 75%, at least 80%, at least 85%, at least 90%, at least 95%, at least 96%, at least 97%, at least 98%, at least 99%, or 100% identity to SEQ ID NO: 149. In some embodiments, the SVV genome of the replicon comprises one or more deletions or truncations of the SVV genome within the region corresponding to nucleotide 1261 to nucleotide 3477, inclusive of the endpoints, and according to the numbering of SEQ ID NO: 1, wherein the one or more deletions or truncations comprise at least 2200 bp in total, and wherein the SVV genome of the replicon comprises a CRE polynucleotide sequence having at least 70%, at least 75%, at least 80%, at least 85%, at least 90%, at least 95%, at least 96%, at least 97%, at least 98%, at least 99%, or 100% identity to SEQ ID NO: 149.

[0114] In some embodiments, the SVV genome of the replicon comprises one or more of a 2B coding region, a 2C coding region, a 3A coding region, a 3B coding region, a 3Cpro coding region, and a 3D(RdRp) coding region. In some embodiments, the SVV genome of the replicon comprises a 2B coding region, a 2C coding region, a 3A coding region, a 3B coding region, a 3Cpro coding region, and a 3D(RdRp) coding region. In some embodiments, the SVV genome of the replicon comprises a 2C coding region, a 3A coding region, a 3B coding region, a 3Cpro coding region, and a 3D(RdRp) coding region. In some embodiments, the SVV genome of the replicon comprises, from 5′ to 3′, the 2B coding region, the 2C coding region, the 3A coding region, the 3B coding region, the 3Cpro coding region, and the 3D(RdRp) coding region. In some embodiments, a portion of the SVV genome of the replicon comprising the 2B coding region, the 2C coding region, the 3A coding region, the 3B coding region, the 3Cpro coding region, and the 3D(RdRp) coding region has at least 70%, at least 75%, at least 80%, at least 85%, at least 90%, at least 93%, at least 95%, at least 97%, at least 98%, at least 99%, at least 99.5%, or 100% sequence identity to nucleotide 3505 to 7310 according to SEQ ID NO: 1.

[0115] In some embodiments, the recombinant RNA replicon comprises, from 5′ to 3′, the 5′ leader protein coding sequence, the VP4 coding region, the VP2 coding region or a truncation thereof, and the heterologous polynucleotide. In some embodiments, the replicon comprises, from 5′ to 3′, the heterologous polynucleotide and the 2B coding region. In some embodiments, the recombinant RNA replicon comprises, from 5′ to 3′, the heterologous polynucleotide, the 2B coding region, the 2C coding region, the 3A coding region, the 3B coding region, the 3Cpro coding region, and the 3D(RdRp).

[0116] In some embodiments, the SVV genome comprises a 2A coding region. In some embodiments, the 2A coding region is located between the VP2 coding region or a truncation thereof and the heterologous polynucleotide. In some embodiments, the 2A coding region is located between the heterologous polynucleotide and the 2B coding region.

[0117] In some embodiments, the SVV derived replicon comprises one or more heterologous polynucleotides. In some embodiments, the heterologous polynucleotide of the replicon comprises at least 500 bp, at least 1000 bp, at least 1500 bp, at least 2000 bp, at least 2500 bp, or at least 3000 bp. In some embodiments, the one or more heterologous polynucleotides comprises at least 500 bp, at least 1000 bp, at least 1500 bp, at least 2000 bp, at least 2500 bp, or at least 3000 bp in total.

[0118] In some embodiments, the SVV derived replicon comprises a sequence having at least 70%, at least 75%, at least 80%, at least 85%, at least 90%, at least 93%, at least 95%, at least 97%, at least 98%, at least 99%, at least 99.5%, or 100% sequence identity to any one of SEQ ID NOs: 20, 22, 24, 26, 28, 30, 32, 34, 36, 38, 40, 42, 44, 46, 48, 50, 52, 54, 56, 58, and 60.

[0119] In some embodiments, the SVV derived replicon comprises an SVV genome and a heterologous polynucleotide; wherein the SVV genome comprises a deletion between nucleotide 1261 and 3477, inclusive of the endpoints, and according to the numbering of SEQ ID NO: 1, wherein the deletion is at least 500 bp, 600 bp, 700 bp, 800 bp, 900 bp, 1000 bp, 1100 bp, 1200 bp, 1300 bp, 1400 bp, 1500 bp, 1600 bp, 1700 bp, 1800 bp, 1900 bp, 2000 bp, 2100 bp, 2200 bp, 2300 bp, or 2400 bp in total length; wherein the SVV genome comprises a CRE comprising a polynucleotide sequence having at least 70%, at least 75%, at least 80%, at least 85%, at least 90%, at least 95%, at least 96%, at least 97%, at least 98%, at least 99%, at least 99.5%, or 100% identity to SEQ ID NO: 149.

[0120] In some embodiments, the SVV derived replicon comprises an SVV genome and a heterologous polynucleotide; wherein the SVV genome comprises a deletion between nucleotide 1261 and 3477, inclusive of the endpoints, and according to the numbering of SEQ ID NO: 1, wherein the deletion is at least 500 bp, 600 bp, 700 bp, 800 bp, 900 bp, 1000 bp, 1100 bp, 1200 bp, 1300 bp, 1400 bp, 1500 bp, 1600 bp, 1700 bp, 1800 bp, 1900 bp, 2000 bp, 2100 bp, 2200 bp, 2300 bp, or 2400 bp in total length; wherein the SVV genome comprises a CRE comprising a polynucleotide sequence having at least 90% identity to SEQ ID NO: 149.

[0121] In some embodiments, the SVV derived replicon comprises an SVV genome and a heterologous polynucleotide; wherein the SVV genome comprises a deletion between nucleotide 1261 and 3477, inclusive of the endpoints, according to the numbering of SEQ ID NO: 1, wherein the deletion is at least 500 bp, 600 bp, 700 bp, 800 bp, 900 bp, 1000 bp, 1100 bp, 1200 bp, 1300 bp, 1400 bp, 1500 bp, 1600 bp, 1700 bp, 1800 bp, 1900 bp, 2000 bp, 2100 bp, 2200 bp, 2300 bp, or 2400 bp in total length; wherein the SVV genome comprises a polynucleotide sequence having at least 70%, at least 75%, at least 80%, at least 85%, at least 90%, at least 95%, at least 96%, at least 97%, at least 98%, at least 99%, at least 99.5%, or 100% identity to nucleotide 1 to 1260 according to SEQ ID NO: 1; wherein the SVV genome comprises a polynucleotide sequence having at least 70%, at least 75%, at least 80%, at least 85%, at least 90%, at least 95%, at least 96%, at least 97%, at least 98%, at least 99%, at least 99.5%, or 100% identity to nucleotide 3505 to 7310 according to SEQ ID NO: 1; and wherein the SVV genome comprises a CRE comprising a polynucleotide sequence having at least 70%, at least 75%, at least 80%, at least 85%, at least 90%, at least 95%, at least 96%, at least 97%, at least 98%, at least 99%, at least 99.5%, or 100% identity to SEQ ID NO: 149.

[0122] In some embodiments, the SVV derived replicon comprises an SVV genome and a heterologous polynucleotide; wherein the SVV genome comprises a deletion between nucleotide 1261 and 3477, inclusive of the endpoints, according to the numbering of SEQ ID NO: 1, wherein the deletion is at least 500 bp, 600 bp, 700 bp, 800 bp, 900 bp, 1000 bp, 1100 bp, 1200 bp, 1300 bp, 1400 bp, 1500 bp, 1600 bp, 1700 bp, 1800 bp, 1900 bp, 2000 bp, 2100 bp, 2200 bp, 2300 bp, or 2400 bp in total length; wherein the SVV genome comprises a polynucleotide sequence having at least 90% identity to nucleotide 1 to 1260 according to SEQ ID NO: 1; wherein the SVV genome comprises a polynucleotide sequence having at least 90% identity to nucleotide 3505 to 7310 according to SEQ ID NO: 1; and wherein the SVV genome comprises a CRE comprising a polynucleotide sequence having at least 90% identity to SEQ ID NO: 149.

### Recombinant Coxsackievirus Replicon

[0123] The disclosure provides recombinant RNA replicons comprising a coxsackievirus viral genome, wherein the coxsackievirus genome comprises a deletion or a truncation in one or more coxsackievirus protein coding regions. In some embodiments, the replicon comprises a heterologous polynucleotide.

[0124] In some embodiments, the coxsackievirus is selected from CVB3, CVA21, and CVA9. The nucleic acid sequences of exemplary coxsackieviruses are provided as GenBank Reference No. M33854.1 (CVB3; SEQ ID NO: 16), GenBank Reference No. KT161266.1 (CVA21; SEQ ID NO: 17), and GenBank Reference No. D00627.1 (CVA9; SEQ ID NO: 18). In some embodiments, the recombinant RNA replicon described herein encode a chimeric coxsackievirus.

[0125] For coxsackievirus viral genome, the VP4 coding region encompasses nucleotide 714 to nucleotide 920 according to SEQ ID NO: 3. The VP2 coding region encompasses nucleotide 921 to nucleotide 1736 according to SEQ ID NO: 3. The VP3 coding region encompasses nucleotide 1737 to nucleotide 2456 according to SEQ ID NO: 3. The VP1 coding region encompasses nucleotide 2457 to nucleotide 3350 according to SEQ ID NO: 3. The 2A coding region encompasses nucleotide 3351 to nucleotide 3797 according to SEQ ID NO: 3. The 2B coding region encompasses nucleotide 3798 to nucleotide 4088 according to SEQ ID NO: 3.

[0126] In some embodiments, the recombinant RNA replicon comprises a coxsackievirus genome comprising the 5′ UTR sequence of SEQ ID NO: 4. In such embodiments, the 5′ UTR sequence of SEQ ID NO: 4 unexpectedly increases the production of a functional coxsackievirus compared to other previously described 5′ UTR sequences. In some embodiment, the recombinant RNA replicon comprises a modified CVA21 coxsackievirus genome according to the sequence of SEQ ID NO: 3.

[0127] In some embodiments, the coxsackievirus genome of the replicon comprises deletions and/or truncations in one or more VP coding regions. In some embodiments, one, or at least one of the VP4, VP2, VP3 and VP1 coding regions are deleted and/or truncated. In some embodiments, two, or at least two, of the VP coding regions comprising VP4, VP2, VP3 and VP1 are deleted and/or truncated. In some embodiments, three, or at least three, of the VP coding regions comprising VP4, VP2, VP3 and VP1 are deleted and/or truncated. In some embodiments, all of the VP4, VP2, VP3 and VP1 coding regions are deleted and/or truncated.

[0128] In some embodiments, the coxsackievirus genome of the replicon comprises, consists essentially of, or consists of, one or more deletions or truncations of the coxsackievirus genome within the region corresponding to nucleotide 714 to nucleotide 3350, inclusive of the endpoints, according to SEQ ID NO: 3. In some embodiments, the coxsackievirus genome of the replicon comprises a deletion of the coxsackievirus genome region corresponding to nucleotide 714 to nucleotide 3350, inclusive of the endpoints, according to SEQ ID NO: 3. In some embodiments, the replicon comprises one or more deletions or truncations within the region corresponding to nucleotide 1000 to nucleotide 3350 according to SEQ ID NO: 3. In some embodiments, the replicon comprises one or more deletions or truncations within the region corresponding to nucleotide 714 to nucleotide 3350, nucleotide 1000 to nucleotide 3350, nucleotide 1500 to nucleotide 3350, nucleotide 2000 to nucleotide 3350, nucleotide 2500 to nucleotide 3350, nucleotide 714 to nucleotide 3000, nucleotide 1000 to nucleotide 3000, nucleotide 1500 to nucleotide 3000, nucleotide 2000 to nucleotide 3000, nucleotide 2500 to nucleotide 3000, nucleotide 714 to nucleotide 2500, nucleotide 1000 to nucleotide 2500, nucleotide 1500 to nucleotide 2500, nucleotide 2000 to nucleotide 2500, nucleotide 714 to nucleotide 2000, nucleotide 1000 to nucleotide 2000, nucleotide 1500 to nucleotide 2000, nucleotide 714 to nucleotide 1500, or nucleotide 1000 to nucleotide 1500, inclusive of the endpoints, according to SEQ ID NO: 3. All ranges are inclusive of the endpoints.

[0129] In some embodiments, the coxsackievirus genome of the replicon comprises, consists essentially of, or consists of, one or more deletions or truncations of the coxsackievirus genome within the region corresponding to nucleotide 717 to nucleotide 3332, inclusive of the endpoints, according to SEQ ID NO: 3. In some embodiments, the coxsackievirus genome of the replicon comprises a deletion of the coxsackievirus genome region corresponding to nucleotide 717 to nucleotide 3332, inclusive of the endpoints, according to SEQ ID NO: 3. In some embodiments, the replicon comprises one or more deletions or truncations within the region corresponding to nucleotide 1000 to nucleotide 3332 according to SEQ ID NO: 3. In some embodiments, the replicon comprises one or more deletions or truncations within the region corresponding to nucleotide 717 to nucleotide 3332, nucleotide 1000 to nucleotide 3332, nucleotide 1500 to nucleotide 3332, nucleotide 2000 to nucleotide 3332, nucleotide 2500 to nucleotide 3332, nucleotide 717 to nucleotide 3000, nucleotide 1000 to nucleotide 3000, nucleotide 1500 to nucleotide 3000, nucleotide 2000 to nucleotide 3000, nucleotide 2500 to nucleotide 3000, nucleotide 717 to nucleotide 2500, nucleotide 1000 to nucleotide 2500, nucleotide 1500 to nucleotide 2500, nucleotide 2000 to nucleotide 2500, nucleotide 717 to nucleotide 2000, nucleotide 1000 to nucleotide 2000, nucleotide 1500 to nucleotide 2000, nucleotide 717 to nucleotide 1500, or nucleotide 1000 to nucleotide 1500, inclusive of the endpoints, according to SEQ ID NO: 3. All ranges are inclusive of the endpoints.

[0130] In some embodiments, each of the deletion or the truncation comprises 1 or more nucleotides. In some embodiments, each of the deletion or the truncation comprises 10 or more nucleotides. In some embodiments, each of the deletion or the truncation comprises 50 or more nucleotides. In some embodiments, each of the deletion or the truncation comprises 100 or more nucleotides. In some embodiments, each of the deletion or the truncation comprises 500 or more nucleotides. In some embodiments, each of the deletion or the truncation comprises 1000 or more nucleotides. All ranges are inclusive of the endpoints.

[0131] In some embodiments, the one or more deletions or truncations comprise at least 500 bp, at least 600 bp, at least 700 bp, at least 800 bp, at least 900 bp, at least 1000 bp, at least 1100 bp, at least 1200 bp, at least 1300 bp, at least 1400 bp, at least 1500 bp, at least 1600 bp, at least 1700 bp, at least 1800 bp, at least 1900 bp, at least 2000 bp, at least 2100 bp, at least 2200 bp, at least 2300 bp, at least 2400 bp, at least 2500 bp, at least 2600 bp, at least 2615 bp, at least 2636 bp, at least 2650 bp, or at least 2700 bp of nucleotides in total. In some embodiments, the one or more deletions or truncations consist of 500 bp, 600 bp, 700 bp, 800 bp, 900 bp, 1000 bp, 1100 bp, 1200 bp, 1300 bp, 1400 bp, 1500 bp, 1600 bp, 1700 bp, 1800 bp, 1900 bp, 2000 bp, 2100 bp, 2200 bp, 2300 bp, 2400 bp, 2500 bp, 2600 bp, 2700 bp, or any values in between, of nucleotides in total. In some embodiments, the one or more deletions or truncations consist of between 500-2700 bp, between 500-2600 bp, between 500-2300 bp, between 500-2000 bp, between 500-1500 bp, between 500-1000 bp, between 1000-2700 bp, between 1000-2600 bp, between 1000-2300 bp, between 1000-2000 bp, between 1000-1500 bp, between 1500-2700 bp, between 1500-2600 bp, between 1500-2300 bp, between 1500-2200 bp, between 1500-2000 bp, between 2000-2700 bp, between 2000-2600 bp, between 2000-2300 bp, or between 2000-2200 bp of nucleotides in total. All ranges are inclusive of the endpoints.

[0132] In some embodiments, the coxsackievirus genome of the replicon comprises a 5′ UTR. In some embodiments, a portion of the coxsackievirus genome of the replicon comprising the 5′ UTR has at least 70%, at least 75%, at least 80%, at least 85%, at least 90%, at least 93%, at least 95%, at least 97%, at least 98%, at least 99%, at least 99.5%, or 100% sequence identity to SEQ ID NO: 4. In some embodiments, a portion of the coxsackievirus genome of the replicon comprising the 5′ UTR has about 70%, about 75%, about 80%, about 85%, about 90%, about 93%, about 95%, about 97%, about 98%, about 99%, about 99.5%, or 100% sequence identity to SEQ ID NO: 4. In some embodiments, a portion of the coxsackievirus genome of the replicon comprising the 5′ UTR has at most 1, at most 5, at most 10, or at most 20 nucleotide mutations according to SEQ ID NO: 4.

[0133] In some embodiments, the coxsackievirus genome of the replicon comprises one or more of a 2B coding region, a 2C coding region, a 3A coding region, a 3B coding region, a VPg coding region, a 3C coding region, a 3D pol coding region, and a 3′ UTR. In some embodiments, the coxsackievirus genome of the replicon comprises a 2B coding region, a 2C coding region, a 3A coding region, a 3B coding region, a VPg coding region, a 3C coding region, a 3D pol coding region, and a 3′ UTR. In some embodiments, the coxsackievirus genome of the replicon comprises, from 5′ to 3′ direction, the 2B coding region, the 2C coding region, the 3A coding region, the 3B coding region, the VPg coding region, the 3C coding region, the 3D pol coding region, and the 3′ UTR. In some embodiments, a portion of the coxsackievirus genome comprising the 2B coding region, the 2C coding region, the 3A coding region, the 3B coding region, the VPg coding region, the 3C coding region, the 3D pol coding region, and the 3′ UTR has at least 70%, at least 75%, at least 80%, at least 85%, at least 90%, at least 93%, at least 95%, at least 97%, at least 98%, at least 99%, at least 99.5%, or 100% sequence identity to nucleotide 3797 to 7435 according to SEQ ID NO: 3.

[0134] In some embodiments, the replicon comprises, from 5′ to 3′, the 5′ UTR and the heterologous polynucleotide. In some embodiments, the replicon comprises, from 5′ to 3′, the heterologous polynucleotide and the 2B coding region. In some embodiments, the recombinant RNA replicon comprises, from 5′ to 3′, the heterologous polynucleotide, the 2B coding region, the 2C coding region, the 3A coding region, the 3B coding region, the VPg coding region, the 3C coding region, the 3D pol coding region, and the 3′ UTR.

[0135] In some embodiments, the replicon further comprises a 2A coding region. In some embodiments, the 2A coding region is located between the 5′ UTR and the heterologous polynucleotide. In some embodiments, the 2A coding region is located between the heterologous polynucleotide and the 2B coding region. In some embodiments, the replicon comprises, from 5′ to 3′, the 5′ UTR, the heterologous polynucleotide, and the 2A coding region. In some embodiments, the coxsackievirus genome of the replicon comprises, from 5′ to 3′ direction, the heterologous polynucleotide, the 2A coding region, the 2B coding region, the 2C coding region, the 3A coding region, the 3B coding region, the VPg coding region, the 3C coding region, the 3D pol coding region, and the 3′ UTR.

[0136] In some embodiments, the coxsackievirus genome of the replicon comprises, from 5′ to 3′ direction, the 2A coding region, the 2B coding region, the 2C coding region, the 3A coding region, the 3B coding region, the VPg coding region, the 3C coding region, the 3D pol coding region, and the 3′ UTR. In some embodiments, a portion of the coxsackievirus genome comprising the 2A coding region, the 2B coding region, the 2C coding region, the 3A coding region, the 3B coding region, the VPg coding region, the 3C coding region, the 3D pol coding region, and the 3′ UTR has at least 70%, at least 75%, at least 80%, at least 85%, at least 90%, at least 93%, at least 95%, at least 97%, at least 98%, at least 99%, at least 99.5%, or 100% sequence identity to nucleotide 3492 to 7435 according to SEQ ID NO: 3.

[0137] In some embodiments, the coxsackievirus derived replicon comprises one or more heterologous polynucleotides. In some embodiments, the heterologous polynucleotide of the replicon has a length of at least 500 bp, at least 1000 bp, at least 1500 bp, at least 2000 bp, at least 2500 bp, or at least 3000 bp. In some embodiments, the one or more heterologous polynucleotides have a total length of at least 500 bp, at least 1000 bp, at least 1500 bp, at least 2000 bp, at least 2500 bp, or at least 3000 bp. All ranges are inclusive of the endpoints.

[0138] In some embodiments, the coxsackievirus derived replicon comprises a sequence having at least 70%, at least 75%, at least 80%, at least 85%, at least 90%, at least 93%, at least 95%, at least 97%, at least 98%, at least 99%, at least 99.5%, or 100% sequence identity to SEQ ID NO: 62.

### Heterologous Polynucleotide and Payload Molecules

[0139] In some embodiments, the replicon comprises a heterologous polynucleotide encoding one or more payload molecules.

[0140] In some embodiments, the heterologous nucleotide is inserted into a viral genome location between the 2A coding region and the 2B coding region of the viral genome of the replicon. In some embodiments, the heterologous nucleotide is inserted into a viral genome location upstream to the 2A coding region of the viral genome of the replicon. In some embodiments, the heterologous nucleotide is inserted into a viral genome location downstream to the 3D (RdRp) or 3D pol coding region.

[0141] In some embodiments, the heterologous nucleotide is inserted into a replicon comprising an SVV viral genome. In some embodiments, the heterologous nucleotide is inserted into the region of the viral genome corresponding to nucleotide 1117 to 3479 of SEQ ID NO: 1. In some embodiments, the heterologous nucleotide is inserted into the region of the viral genome corresponding to nucleotide 3504 to 3505 of SEQ ID NO: 1. In some embodiments, the heterologous nucleotide is inserted into the region of the viral genome corresponding to nucleotide 7209 to 7210 of SEQ ID NO: 1.

[0142] In some embodiments, the heterologous nucleotide is inserted into a replicon comprising a coxsakievirus viral genome. In some embodiments, the heterologous nucleotide is inserted into the region of the viral genome corresponding to nucleotide 713 to 3351 of SEQ ID NO: 3. In some embodiments, the heterologous nucleotide is inserted into the region of the viral genome corresponding to nucleotide 3797 to 3798 of SEQ ID NO: 3. In some embodiments, the heterologous nucleotide is inserted into the region of the viral genome corresponding to nucleotide 7334 to 7335 of SEQ ID NO: 3.

[0143] In some embodiments, one or more miRNA target sequences are inserted into the heterologous polynucleotide encoding the payload molecule. In some embodiments, one or more miRNA target sequences are incorporated into the 3′ or 5′ UTR of the heterologous polynucleotide encoding the payload molecule. In some embodiments, one or more miRNA target sequences are incorporated into the coding region of the heterologous polynucleotide encoding the payload molecule. In such embodiments, translation and subsequent expression of the payload does not occur, or is substantially reduced, in cells where the corresponding miRNA is expressed. In some embodiments, the payload molecule is a protein.

[0144] In some embodiments, the payload molecule is a secreted protein. In some embodiments, the secreted protein comprises a signal peptide. In some embodiments, the secreted protein comprises a non-native signal peptide. In some embodiments, the signal peptide facilitates the secretion of the payload molecule. In some embodiments, the secreted protein does not have a signal peptide.

[0145] In some embodiments, the heterologous polynucleotide encoding the payload molecule forms a continuous open reading frame with one or more of the viral protein coding regions. Here, continuous open reading frame refers to a sequence of specific nucleotide triplets that can be translated into a continuous polypeptide. In some embodiments, the payload molecule and the viral protein are linked by a cleavage polypeptide. In some embodiments, the viral protein is 2B.

[0146] In some embodiments, the payload molecule is a cytotoxic peptide. As used herein, a “cytotoxic peptide” refers to a protein capable of inducing cell death when expressed in a host cell and/or cell death of a neighboring cell when secreted by the host cell. In some embodiments, the cytotoxic peptide is a caspase, p53, diphtheria toxin (DT), Pseudomonas Exotoxin A (PEA), Type I ribozyme inactivating proteins (RIPs) (e.g., saporin and gelonin), Type II RIPs (e.g., ricin), Shiga-like toxin I (Slt1), photosensitive reactive oxygen species (e.g. killer-red). In certain embodiments, the cytotoxic peptide is encoded by a suicide gene resulting in cell death through apoptosis, such as a caspase gene.

[0147] In some embodiments, the payload molecule is an immune modulatory peptide. As used herein, an “immune modulatory peptide” is a peptide capable of modulating (e.g., activating or inhibiting) a particular immune receptor and/or pathway. In some embodiments, the immune modulatory peptides can act on any mammalian cell including immune cells, tissue cells, and stromal cells. In a preferred embodiment, the immune modulatory peptide acts on an immune cell such as a T cell, an NK cell, an NKT T cell, a B cell, a dendritic cell, a macrophage, a basophil, a mast cell, or an eosinophil. Exemplary immune modulatory peptides include antigen-binding molecules such as antibodies or antigen binding fragments thereof, cytokines, chemokines, soluble receptors, cell-surface receptor ligands, bipartite polypeptides, and enzymes.

[0148] In some embodiments, the payload molecule is a cytokine such as IFNg, GM-CSF, IL-1, IL-2, IL-12, IL-15, IL-18, IL-36γ, TNFα, IFNα, IFNβ, IFNγ, or TNFSF14. In some embodiments, the payload molecule is a chemokine such as CXCL10, CXCL9, CCL21, CCL4, or CCL5. In some embodiments, the payload molecule is a ligand for a cell-surface receptor such as an NKG2D ligand, a neuropilin ligand, Flt3 ligand, a CD47 ligand (e.g., SIRPIα). In some embodiments, the payload molecule is a soluble receptor, such as a soluble cytokine receptor (e.g., IL-13R, TGFβR1, TGFβR2, IL-35R, IL-15R, IL-2R, IL-12R, and interferon receptors) or a soluble innate immune receptor (e.g., Toll-like receptors, complement receptors, etc.). In some embodiments, the payload molecule is a dominant agonist mutant of a protein involved in intracellular RNA and/or DNA sensing (e.g. a dominant agonist mutant of STING, RIG-1, or MDA-5).

[0149] In some embodiments, the payload molecule is an antigen-binding molecule such as an antibody or antigen-binding fragments thereof (e.g., a single chain variable fragment (scFv), an F(ab), etc.). In some embodiments, the antigen-binding molecule specifically binds to a cell surface receptor, such as an immune checkpoint receptor (e.g., PD-1, PD-L1, and CTLA4) or additional cell surface receptors involved in cell growth and activation (e.g., OX40, CD200R, CD47, CSF1R, 41BB, CD40, and NKG2D). In some embodiments, the antigen-binding molecule specifically binds to an antigen shown in Table 3 and/or 4.

[0150] In some embodiments, the payload molecule is a scorpion polypeptide such as chlorotoxin, BmKn-2, neopladine 1, neopladine 2, and mauriporin. In some embodiments, the payload molecule is a snake polypeptide such as contortrostatin, apoxin-I, bothropstoxin-I, BJcuL, OHAP-1, rhodostomin, drCT-I, CTX-III, B1L, and ACTX-6. In some embodiments, the payload molecule is a spider polypeptide such as a latarcin and hyaluronidase. In some embodiments, the payload molecule is a bee polypeptide such as melittin and apamin. In some embodiments, the payload molecule is a frog polypeptide such as PsT-1, PdT-1, and PdT-2.

[0151] In some embodiments, the payload molecule is an enzyme. In some embodiments, the enzyme is capable of modulating the tumor microenvironment by way of altering the extracellular matrix. In such embodiments, the enzyme may include, but is not limited to, a matrix metalloprotease (e.g., MMP9), a collagenase, a hyaluronidase, a gelatinase, or an elastase. In some embodiments, the enzyme is part of a gene directed enzyme prodrug therapy (GDEPT) system, such as herpes simplex virus thymidine kinase, cytosine deaminase, nitroreductase, carboxypeptidase G2, purine nucleoside phosphorylase, or cytochrome P450. In some embodiments, the enzyme is capable of inducing or activating cell death pathways in the target cell (e.g., a caspase). In some embodiments, the enzyme is capable of degrading an extracellular metabolite or message (e.g. arginase or 15-Hydroxyprostaglandin Dehydrogenase).

[0152] In some embodiments, the payload molecule is a bipartite polypeptide (bipartite antigen binding molecule). As used herein, a “bipartite polypeptide” refers to a multimeric protein comprised of a first domain capable of binding a cell surface antigen expressed on a non-cancerous effector cell (e.g., a T cell) and a second domain capable of binding a cell-surface antigen expressed by a target cell (e.g., a cancerous cell, a tumor cell, or an effector cell of a different type). In some embodiments, the individual polypeptide domains of a bipartite polypeptide may comprise an antibody or binding fragment thereof (e.g, a single chain variable fragment (scFv) or an F(ab)), a nanobody, a diabody, a flexibody, a DOCK-AND-LOCK™ antibody, or a monoclonal anti-idiotypic antibody (mAb2). In some embodiments, the structure of the bipartite polypeptides may be a dual-variable domain antibody (DVD-Ig™), a Tandab®, a bi-specific T cell engager (BiTE™), a DuoBody®, or a dual affinity retargeting (DART) polypeptide. In some embodiments, the bipartite polypeptide is a BiTE and comprises a domain that specifically binds to an antigen shown in Table 3 and/or 4. Exemplary BiTEs are shown below in Table 2.

TABLE 2
Validated BiTEs used in preclinical and clinical studies

| Target | Name | Target Disease | Clinical Status |
|---|---|---|---|
| CD19 | Blinatumomab/MT-103/MEDI- | NHL, ALL | Phase I/II/III |
| | 538 | | |
| EpCAM | MT110 | Solid tumors | Phase I |
| CEA | MT111/MEDI-565 | GI adenocarcinoma | Phase I |
| PSMA | Pasotuxizumab/BAY2010112/ | Prostate | Phase I |
| | AMG112 | | |
| CD33 | AMG330 | AML | Preclinical |
| EGFR | C-BiTE and P-BiTE antibodies | Colorectal cancer | Preclinical |
| Her2 | FynomAb, COVA420, HER2- | Breast and gastric | Preclinical |
| | BsAb | carcinoma | |
| EphA2 | bscEphA2xCD3 | Multiple solid tumors | Preclinical |
| MCSP | MCSP-BiTE | Melanoma | Preclinical |
| ADAM17 | A300E | Prostate cancer | Preclinical |
| PSCA | CD3-PSCA(MB1) | Prostate cancer | Preclinical |
| 17-A1 | CD3/17-1A-bispecific | Colorectal cancer | Preclinical |
| NKG2D | scFv-NKG2D, huNKG2D- | Multiple solid and liquid | Preclinical |
| ligands | OKT3 | tumors | |
| DLL3 | AMG757 | Small Cell Lung Cancer | Clinical |

[0153] In some embodiments, the cell-surface antigen expressed on an effector cell, which the bipartite polypeptide binds to, is selected from Table 3 below. In some embodiments, the bipartite polypeptide binds to CD3 or one of its components. CD3 is a protein complex and T cell co-receptor that is expressed on T lymphocytes as part of the T cell multimolecular receptor (TCR). It comprises CD37, CD36, CD3E, and/or CD34 receptor chains. In some embodiments, the bipartite polypeptide binds to NKp46. NKp46, also known as CD335, belongs to the natural cytotoxicity receptor (NCR) family and is a glycoprotein with 2 Ig-like domains and a short cytoplasmic tail. In some embodiments, the bipartite polypeptide binds to CD16. CD16, also known as FcγRIII, is a cluster of differentiation molecule found on the surface of natural killer cells, neutrophils, monocytes, and macrophages. In some embodiments, the bipartite polypeptide binds to SIRPα. SIRPα, also known as signal regulatory protein a, is a regulatory membrane glycoprotein from SIRP family expressed mainly by myeloid cells and also by stem cells or neurons, which interacts with transmembrane protein CD47.

[0154] In some embodiments, the cell-surface antigen expressed on a tumor cell or effector cell is selected from Table 4 below. In some embodiments, the cell-surface antigen expressed on a tumor cell is a tumor antigen. In some embodiments, the tumor antigen is selected from CD19, EpCAM, CEA, PSMA, CD33, EGFR, Her2, EphA2, MCSP, ADAM17, PSCA, 17-A1, an NKGD2 ligand, CSF1R, FAP, GD2, DLL3, or neuropilin. In some embodiments, the tumor antigen is selected from those listed in Table 4.

[0155] In some embodiments, the bipartite polypeptide is selected from a molecule binding to DLL3 and an effector cell target antigen, a molecule binding to FAP and an effector cell target antigen, and a molecule binding to EpCAM and an effector cell target antigen. In some embodiments, the effector cell target antigen is selected from Table 3. In some embodiments, the effect cell target antigen is a T cell target antigen. In some embodiments, the effector cell target antigen is CD3. In some embodiments, the effector cell target antigen is CD3ε.

TABLE 3
Exemplary effector cell target antigens

| T cell | | NKT cell | NK Cell | Other |
|---|---|---|---|---|
| CD3 | CD30 | CD3 | CD16 | CD48 |
| CD3γ | CD38 | CD3γ | CD94/NKG2 | LIGHT |
| | | | (e.g., NKG2D) | |
| CD3δ | CD40 | CD3δ | NKp30 | CD44 |
| CD3ε | CD57 | CD3ε | NKp44 | CD45 |
| CD3ξ | CD69 | CD3ξ | NKp46 | IL-1R2 |
| CD2 | CD70 | invariant TCR | KARs | IL-1Rα |
| CD4 | CD73 | | | IL-1Rα2 |
| CD5 | CD81 | | | IL-13Rα2 |
| CD6 | CD82 | | | IL-15Ra |
| CD7 | CD96 | | | CCR5 |
| CD8 | CD134 | | | CCR8 |
| CD16 | CD137 | | | SIRPα |
| CD25 | CD152 | | | |
| CD27 | CD278 | | | |
| CD28 | | | | |

TABLE 4
Exemplary target cell antigens
Target Cell Antigens

| | | | |
|---|---|---|---|
| 8H9 | CRISP3 | Lewis-Y | Fas |
| GnT-V, β1, 6-N | DC-SIGN | LIV-1 (SLC39A6) | SOX2 |
| AFP | DHFR | Livin | STEAP1 |
| ART1 | EGP40 | LAMP1 | SLITRK6 |
| ART4 | EZH2 | MAGEA3 | NaPi2a |
| ABCG2 | EpCAM | MAGEA4 | SOX1 |
| B7-H3 | EphA2 | MAGEB6 | SOX11 |
| B7-H4 | EphA2/Eck | MAGEA1 | SPANXA1 |
| B7-H6 | EGFRvIII | MART-1 | SART-1 |
| BCMA | E-cadherin | MCSP | SSX4 |
| B-cyclin | EGP2 | MME | SSX5 |
| BMI1 | ETA | mesothelin (MSLN) | Survivin |
| CA-125 | ERBB3 | MAPK1 | SSX2 |
| cadherin | ERBB3/4 | MUC16 | TAG72 |
| CABYR | ERBB4 | MUC1 | TEM1 |
| CTAG2 | EPO | MRP-3 | TEM8 |
| CA6 | F3 | MyoD-1 | TSGA10 |
| CAIX | FAR | NCAM | TSSK6 |
| CEA | FBP | nectin 4 | thyroglobulin |
| CEACAM5 | FTHL 17 | Nestin | transferrin receptor |
| CEACAM6 | fetal AchR | NEP | TACSTD2 (TROP2) |
| Cav-1 | FAP | NY-ESO-1 | TMEM97 |
| CD10 | FGFR3 | hHLA-A | TRP-2 |
| CD117 | FR-a | H60 | TULP2 |
| CD123 | Fra-1/Fosl 1 | OLIG2 | TROP2 |
| CD133 | GAGE1 | 5T4 | tyrosinase |
| CD138 | GD2 | p53 | TRP1 |
| CD15 | GD3 | P-Cadherin | UPAR |
| CD171 | Glil | PB | VEGF |
| CD19 | GP100 | P-glycoprotein | VEGF receptors |
| CD20 | GPA33 | PMCT (SLC13A5) | VEGRR2 |
| CD21 | | PRAME | BRAF |
| CD22 | Glypican-3 | PROXl | WT-1 |
| CD30 | HIV gp120 | PSA | XAGE2 |
| CD33 | HLA-A | PSCA | ZNF165 |
| CD37 | HLA-A2 | PSMA | αᵥβ₆ integrin |
| CD38 | HLA-AI | PSC1 | β-catenin |
| CD44v6 | HLA-B | PVRL4 | cathepsin B |
| CD44v7/8 | HLA-C | Ras | CSAG2 |
| CD74 | HMW-MAA | ROR1 | CTAG |
| Cd79b | Her2/Neu | SART2 | EGFR |
| CD124 (IL-4R) | Her3 | SART3 | EGP40 |
| CDH3 | u70/80 | oncofetal variants | EZH2 |
| | | of fibronectin | |
| Ki-67 | LICAM | tenascin | HIV sp120 |
| CSPG4 | ULBP1 | LICAM | kappa light chain |
| CALLA | ULBP2 | Rae-1α | LDHC |
| CSAG2 | ULBP3 | | TRP-1 |
| COX-2 | ULBP6 | Rae-1β | Fas-L |
| Lambda | MICA | Rae-1δ | DLL3 |
| LAYN | MICB | Rae-1γ | MAGEA12 |
| LeuM-1 | Her3 | PDGF | MAGEC2 |
| KDR | EGF | SSX | BAGE |
| CD47 | SIRP1α | SSX2 | BAGE1 |
| | Cyclin A | KKLC1 | GAGE |
| | KMHN1 | SAGE | XAGE |
| | | SPA17 | XAGE1B |

[0156] In some embodiments, the bipartite polypeptide specifically binds to a combination of two antigens that are marked as “x” according to Table 5 below. Those “x” marked combinations in Table 5 that have the same antigens indicate that the bipartite polypeptide specifically binds to two different epitopes of the same antigen. In some embodiments, the bipartite polypeptide is a BiTE.

TABLE 5
Combination of two antigens for bipartite polypeptide binding

| | CD3 | CD3γ | CD3δ | CD3ε | CD3ξ | CD2 | CD4 | CD5 |
|---|---|---|---|---|---|---|---|---|
| 8H9 | x | x | x | x | x | x | x | x |
| GnT-V,β1,6- | x | x | x | x | x | x | x | x |
| N | | | | | | | | |
| AFP | x | x | x | x | x | x | x | x |
| ART1 | x | x | x | x | x | x | x | x |
| ART4 | x | x | x | x | x | x | x | x |
| ABCG2 | x | x | x | x | x | x | x | x |
| B7-H3 | x | x | x | x | x | x | x | x |
| B7-H4 | x | x | x | x | x | x | x | x |
| B7-H6 | x | x | x | x | x | x | x | x |
| BCMA | x | x | x | x | x | x | x | x |
| B-cyclin | x | x | x | x | x | x | x | x |
| BMI1 | x | x | x | x | x | x | x | x |
| CA-125 | x | x | x | x | x | x | x | x |
| cadherin | x | x | x | x | x | x | x | x |
| CABYR | x | x | x | x | x | x | x | x |
| CTAG2 | x | x | x | x | x | x | x | x |
| CA6 | x | x | x | x | x | x | x | x |
| CAIX | x | x | x | x | x | x | x | x |
| CEA | x | x | x | x | x | x | x | x |
| CEACAM5 | x | x | x | x | x | x | x | x |
| CEACAM6 | x | x | x | x | x | x | x | x |
| Cav-1 | x | x | x | x | x | x | x | x |
| CD10 | x | x | x | x | x | x | x | x |
| CD117 | x | x | x | x | x | x | x | x |
| CD123 | x | x | x | x | x | x | x | x |
| CD133 | x | x | x | x | x | x | x | x |
| CD138 | x | x | x | x | x | x | x | x |
| CD15 | x | x | x | x | x | x | x | x |
| CD171 | x | x | x | x | x | x | x | x |
| CD19 | x | x | x | x | x | x | x | x |
| CD20 | x | x | x | x | x | x | x | x |
| CD21 | x | x | x | x | x | x | x | x |
| CD22 | x | x | x | x | x | x | x | x |
| CD30 | x | x | x | x | x | x | x | x |
| CD33 | x | x | x | x | x | x | x | x |
| CD37 | x | x | x | x | x | x | x | x |
| CD38 | x | x | x | x | x | x | x | x |
| CD44v6 | x | x | x | x | x | x | x | x |
| CD44v7/8 | x | x | x | x | x | x | x | x |
| CD74 | x | x | x | x | x | x | x | x |
| Cd79b | x | x | x | x | x | x | x | x |
| CD124 (IL- | x | x | x | x | x | x | x | x |
| 4R) | | | | | | | | |
| CDH3 | x | x | x | x | x | x | x | x |
| Ki-67 | x | x | x | x | x | x | x | x |
| CSPG4 | x | x | x | x | x | x | x | x |
| CALLA | x | x | x | x | x | x | x | x |
| CSAG2 | x | x | x | x | x | x | x | x |
| COX-2 | x | x | x | x | x | x | x | x |
| Lambda | x | x | x | x | x | x | x | x |
| LAYN | x | x | x | x | x | x | x | x |
| LeuM-1 | x | x | x | x | x | x | x | x |
| KDR | x | x | x | x | x | x | x | x |
| CD47 | x | x | x | x | x | x | x | x |
| CRISP3 | x | x | x | x | x | x | x | x |
| DC-SIGN | x | x | x | x | x | x | x | x |
| DHFR | x | x | x | x | x | x | x | x |
| EGP40 | x | x | x | x | x | x | x | x |
| EZH2 | x | x | x | x | x | x | x | x |
| EpCAM | x | x | x | x | x | x | x | x |
| EphA2 | x | x | x | x | x | x | x | x |
| EphA2/Eck | x | x | x | x | x | x | x | x |
| EGFRvIII | x | x | x | x | x | x | x | x |
| E-cadherin | x | x | x | x | x | x | x | x |
| EGP2 | x | x | x | x | x | x | x | x |
| ETA | x | x | x | x | x | x | x | x |
| ERBB3 | x | x | x | x | x | x | x | x |
| ERBB3/4 | x | x | x | x | x | x | x | x |
| ERBB4 | x | x | x | x | x | x | x | x |
| EPO | x | x | x | x | x | x | x | x |
| F3 | x | x | x | x | x | x | x | x |
| FAR | x | x | x | x | x | x | x | x |
| FBP | x | x | x | x | x | x | x | x |
| FTHL17 | x | x | x | x | x | x | x | x |
| fetal AchR | x | x | x | x | x | x | x | x |
| FAP | x | x | x | x | x | x | x | x |
| FGFR3 | x | x | x | x | x | x | x | x |
| FR-a | x | x | x | x | x | x | x | x |
| Fra-1/Fosl 1 | x | x | x | x | x | x | x | x |
| GAGE1 | x | x | x | x | x | x | x | x |
| GD2 | x | x | x | x | x | x | x | x |
| GD3 | x | x | x | x | x | x | x | x |
| Glil | x | x | x | x | x | x | x | x |
| GP100 | x | x | x | x | x | x | x | x |
| GPA33 | x | x | x | x | x | x | x | x |
| Glypican-3 | x | x | x | x | x | x | x | x |
| HIV gp120 | x | x | x | x | x | x | x | x |
| HLA-A | x | x | x | x | x | x | x | x |
| HLA-A2 | x | x | x | x | x | x | x | x |
| HLA-AI | x | x | x | x | x | x | x | x |
| HLA-B | x | x | x | x | x | x | x | x |
| HLA-C | x | x | x | x | x | x | x | x |
| HMW-MAA | x | x | x | x | x | x | x | x |
| Her2/Neu | x | x | x | x | x | x | x | x |
| Her3 | x | x | x | x | x | x | x | x |
| u70/80 | x | x | x | x | x | x | x | x |
| LICAM | x | x | x | x | x | x | x | x |
| ULBP1 | x | x | x | x | x | x | x | x |
| ULBP2 | x | x | x | x | x | x | x | x |
| ULBP3 | x | x | x | x | x | x | x | x |
| ULBP6 | x | x | x | x | x | x | x | x |
| MICA | x | x | x | x | x | x | x | x |
| MICB | x | x | x | x | x | x | x | x |
| Her3 | x | x | x | x | x | x | x | x |
| EGF | x | x | x | x | x | x | x | x |
| SIRP1α | x | x | x | x | x | x | x | x |
| Lewis-Y | x | x | x | x | x | x | x | x |
| LIV-1 | x | x | x | x | x | x | x | x |
| (SLC39A6) | | | | | | | | |
| Livin | x | x | x | x | x | x | x | x |
| LAMP1 | x | x | x | x | x | x | x | x |
| MAGEA3 | x | x | x | x | x | x | x | x |
| MAGEA4 | x | x | x | x | x | x | x | x |
| MAGEB6 | x | x | x | x | x | x | x | x |
| MAGEA1 | x | x | x | x | x | x | x | x |
| MART-1 | x | x | x | x | x | x | x | x |
| MCSP | x | x | x | x | x | x | x | x |
| MME | x | x | x | x | x | x | x | x |
| mesothelin | x | x | x | x | x | x | x | x |
| (MSLN) | | | | | | | | |
| MAPK1 | x | x | x | x | x | x | x | x |
| MUC16 | x | x | x | x | x | x | x | x |
| MUC1 | x | x | x | x | x | x | x | x |
| MRP-3 | x | x | x | x | x | x | x | x |
| MyoD-1 | x | x | x | x | x | x | x | x |
| NCAM | x | x | x | x | x | x | x | x |
| nectin 4 | x | x | x | x | x | x | x | x |
| Nestin | x | x | x | x | x | x | x | x |
| NEP | x | x | x | x | x | x | x | x |
| NY-ESO-1 | x | x | x | x | x | x | x | x |
| hHLA-A | x | x | x | x | x | x | x | x |
| H60 | x | x | x | x | x | x | x | x |
| OLIG2 | x | x | x | x | x | x | x | x |
| 5T4 | x | x | x | x | x | x | x | x |
| p53 | x | x | x | x | x | x | x | x |
| P-Cadherin | x | x | x | x | x | x | x | x |
| PB | x | x | x | x | x | x | x | x |
| P- | x | x | x | x | x | x | x | x |
| glycoprotein | | | | | | | | |
| PMCT | x | x | x | x | x | x | x | x |
| (SLC13A5) | | | | | | | | |
| PRAME | x | x | x | x | x | x | x | x |
| PROX1 | x | x | x | x | x | x | x | x |
| PSA | x | x | x | x | x | x | x | x |
| PSCA | x | x | x | x | x | x | x | x |
| PSMA | x | x | x | x | x | x | x | x |
| PSC1 | x | x | x | x | x | x | x | x |
| PVRL4 | x | x | x | x | x | x | x | x |
| Ras | x | x | x | x | x | x | x | x |
| ROR1 | x | x | x | x | x | x | x | x |
| SART2 | x | x | x | x | x | x | x | x |
| SART3 | x | x | x | x | x | x | x | x |
| oncofetal | x | x | x | x | x | x | x | x |
| variants of | | | | | | | | |
| fibronectin | | | | | | | | |
| tenascin | x | x | x | x | x | x | x | x |
| LICAM | x | x | x | x | x | x | x | x |
| Rae-1α | x | x | x | x | x | x | x | x |
| Rae-1β | x | x | x | x | x | x | x | x |
| Rae-1δ | x | x | x | x | x | x | x | x |
| Rae-1γ | x | x | x | x | x | x | x | x |
| PDGF | x | x | x | x | x | x | x | x |
| Fas | x | x | x | x | x | x | x | x |
| SOX2 | x | x | x | x | x | x | x | x |
| STEAP1 | x | x | x | x | x | x | x | x |
| SLITRK6 | x | x | x | x | x | x | x | x |
| NaPi2a | x | x | x | x | x | x | x | x |
| SOX1 | x | x | x | x | x | x | x | x |
| SOX11 | x | x | x | x | x | x | x | x |
| SPANXA1 | x | x | x | x | x | x | x | x |
| SART-1 | x | x | x | x | x | x | x | x |
| SSX4 | x | x | x | x | x | x | x | x |
| SSX5 | x | x | x | x | x | x | x | x |
| Survivin | x | x | x | x | x | x | x | x |
| SSX2 | x | x | x | x | x | x | x | x |
| TAG72 | x | x | x | x | x | x | x | x |
| TEM1 | x | x | x | x | x | x | x | x |
| TEM8 | x | x | x | x | x | x | x | x |
| TSGA10 | x | x | x | x | x | x | x | x |
| TSSK6 | x | x | x | x | x | x | x | x |
| thyroglobulin | x | x | x | x | x | x | x | x |
| transferrin | x | x | x | x | x | x | x | x |
| receptor | | | | | | | | |
| TACSTD2 | x | x | x | x | x | x | x | x |
| (TROP2) | | | | | | | | |
| TMEM97 | x | x | x | x | x | x | x | x |
| TRP-2 | x | x | x | x | x | x | x | x |
| TULP2 | x | x | x | x | x | x | x | x |
| TROP2 | x | x | x | x | x | x | x | x |
| tyrosinase | x | x | x | x | x | x | x | x |
| TRP1 | x | x | x | x | x | x | x | x |
| UPAR | x | x | x | x | x | x | x | x |
| VEGF | x | x | x | x | x | x | x | x |
| VEGF | x | x | x | x | x | x | x | x |
| receptors | | | | | | | | |
| VEGRR2 | x | x | x | x | x | x | x | x |
| BRAF | x | x | x | x | x | x | x | x |
| WT-1 | x | x | x | x | x | x | x | x |
| XAGE2 | x | x | x | x | x | x | x | x |
| ZNF165 | x | x | x | x | x | x | x | x |
| αvβ6 integrin | x | x | x | x | x | x | x | x |
| β-catenin | x | x | x | x | x | x | x | x |
| cathepsin B | x | x | x | x | x | x | x | x |
| CSAG2 | x | x | x | x | x | x | x | x |
| CTAG | x | x | x | x | x | x | x | x |
| EGFR | x | x | x | x | x | x | x | x |
| EGP40 | x | x | x | x | x | x | x | x |
| EZH2 | x | x | x | x | x | x | x | x |
| HIV sp120 | x | x | x | x | x | x | x | x |
| kappa light | x | x | x | x | x | x | x | x |
| chain | | | | | | | | |
| LDHC | x | x | x | x | x | x | x | x |
| TRP-1 | x | x | x | x | x | x | x | x |
| Fas-L | x | x | x | x | x | x | x | x |
| DLL3 | x | x | x | x | x | x | x | x |
| MAGEA12 | x | x | x | x | x | x | x | x |
| MAGEC2 | x | x | x | x | x | x | x | x |
| BAGE | x | x | x | x | x | x | x | x |
| BAGE1 | x | x | x | x | x | x | x | x |
| GAGE | x | x | x | x | x | x | x | x |
| XAGE | x | x | x | x | x | x | x | x |
| XAGE1B | x | x | x | x | x | x | x | x |
| SSX | x | x | x | x | x | x | x | x |
| SSX2 | x | x | x | x | x | x | x | x |
| KKLC1 | x | x | x | x | x | x | x | x |
| SAGE | x | x | x | x | x | x | x | x |
| SPA17 | x | x | x | x | x | x | x | x |
| Cyclin A | x | x | x | x | x | x | x | x |
| KMHN1 | x | x | x | x | x | x | x | x |
| | CD6 | CD7 | CD8 | CD16 | CD25 | CD27 | CD28 | CD30 |
| 8H9 | x | x | x | x | x | x | x | x |
| GnT-V,β1,6- | x | x | x | x | x | x | x | x |
| N | | | | | | | | |
| AFP | x | x | x | x | x | x | x | x |
| ART1 | x | x | x | x | x | x | x | x |
| ART4 | x | x | x | x | x | x | x | x |
| ABCG2 | x | x | x | x | x | x | x | x |
| B7-H3 | x | x | x | x | x | x | x | x |
| B7-H4 | x | x | x | x | x | x | x | x |
| B7-H6 | x | x | x | x | x | x | x | x |
| BCMA | x | x | x | x | x | x | x | x |
| B-cyclin | x | x | x | x | x | x | x | x |
| BMI1 | x | x | x | x | x | x | x | x |
| CA-125 | x | x | x | x | x | x | x | x |
| cadherin | x | x | x | x | x | x | x | x |
| CABYR | x | x | x | x | x | x | x | x |
| CTAG2 | x | x | x | x | x | x | x | x |
| CA6 | x | x | x | x | x | x | x | x |
| CAIX | x | x | x | x | x | x | x | x |
| CEA | x | x | x | x | x | x | x | x |
| CEACAM5 | x | x | x | x | x | x | x | x |
| CEACAM6 | x | x | x | x | x | x | x | x |
| Cav-1 | x | x | x | x | x | x | x | x |
| CD10 | x | x | x | x | x | x | x | x |
| CD117 | x | x | x | x | x | x | x | x |
| CD123 | x | x | x | x | x | x | x | x |
| CD133 | x | x | x | x | x | x | x | x |
| CD138 | x | x | x | x | x | x | x | x |
| CD15 | x | x | x | x | x | x | x | x |
| CD171 | x | x | x | x | x | x | x | x |
| CD19 | x | x | x | x | x | x | x | x |
| CD20 | x | x | x | x | x | x | x | x |
| CD21 | x | x | x | x | x | x | x | x |
| CD22 | x | x | x | x | x | x | x | x |
| CD30 | x | x | x | x | x | x | x | x |
| CD33 | x | x | x | x | x | x | x | x |
| CD37 | x | x | x | x | x | x | x | x |
| CD38 | x | x | x | x | x | x | x | x |
| CD44v6 | x | x | x | x | x | x | x | x |
| CD44v7/8 | x | x | x | x | x | x | x | x |
| CD74 | x | x | x | x | x | x | x | x |
| Cd79b | x | x | x | x | x | x | x | x |
| CD124 (IL- | x | x | x | x | x | x | x | x |
| 4R) | | | | | | | | |
| CDH3 | x | x | x | x | x | x | x | x |
| Ki-67 | x | x | x | x | x | x | x | x |
| CSPG4 | x | x | x | x | x | x | x | x |
| CALLA | x | x | x | x | x | x | x | x |
| CSAG2 | x | x | x | x | x | x | x | x |
| COX-2 | x | x | x | x | x | x | x | x |
| Lambda | x | x | x | x | x | x | x | x |
| LAYN | x | x | x | x | x | x | x | x |
| LeuM-1 | x | x | x | x | x | x | x | x |
| KDR | x | x | x | x | x | x | x | x |
| CD47 | x | x | x | x | x | x | x | x |
| CRISP3 | x | x | x | x | x | x | x | x |
| DC-SIGN | x | x | x | x | x | x | x | x |
| DHFR | x | x | x | x | x | x | x | x |
| EGP40 | x | x | x | x | x | x | x | x |
| EZH2 | x | x | x | x | x | x | x | x |
| EpCAM | x | x | x | x | x | x | x | x |
| EphA2 | x | x | x | x | x | x | x | x |
| EphA2/Eck | x | x | x | x | x | x | x | x |
| EGFRvIII | x | x | x | x | x | x | x | x |
| E-cadherin | x | x | x | x | x | x | x | x |
| EGP2 | x | x | x | x | x | x | x | x |
| ETA | x | x | x | x | x | x | x | x |
| ERBB3 | x | x | x | x | x | x | x | x |
| ERBB3/4 | x | x | x | x | x | x | x | x |
| ERBB4 | x | x | x | x | x | x | x | x |
| EPO | x | x | x | x | x | x | x | x |
| F3 | x | x | x | x | x | x | x | x |
| FAR | x | x | x | x | x | x | x | x |
| FBP | x | x | x | x | x | x | x | x |
| FTHL17 | x | x | x | x | x | x | x | x |
| fetal AchR | x | x | x | x | x | x | x | x |
| FAP | x | x | x | x | x | x | x | x |
| FGFR3 | x | x | x | x | x | x | x | x |
| FR-a | x | x | x | x | x | x | x | x |
| Fra-1/Fosl 1 | x | x | x | x | x | x | x | x |
| GAGE1 | x | x | x | x | x | x | x | x |
| GD2 | x | x | x | x | x | x | x | x |
| GD3 | x | x | x | x | x | x | x | x |
| Glil | x | x | x | x | x | x | x | x |
| GP100 | x | x | x | x | x | x | x | x |
| GPA33 | x | x | x | x | x | x | x | x |
| Glypican-3 | x | x | x | x | x | x | x | x |
| HIV gp120 | x | x | x | x | x | x | x | x |
| HLA-A | x | x | x | x | x | x | x | x |
| HLA-A2 | x | x | x | x | x | x | x | x |
| HLA-AI | x | x | x | x | x | x | x | x |
| HLA-B | x | x | x | x | x | x | x | x |
| HLA-C | x | x | x | x | x | x | x | x |
| HMW-MAA | x | x | x | x | x | x | x | x |
| Her2/Neu | x | x | x | x | x | x | x | x |
| Her3 | x | x | x | x | x | x | x | x |
| u70/80 | x | x | x | x | x | x | x | x |
| LICAM | x | x | x | x | x | x | x | x |
| ULBP1 | x | x | x | x | x | x | x | x |
| ULBP2 | x | x | x | x | x | x | x | x |
| ULBP3 | x | x | x | x | x | x | x | x |
| ULBP6 | x | x | x | x | x | x | x | x |
| MICA | x | x | x | x | x | x | x | x |
| MICB | x | x | x | x | x | x | x | x |
| Her3 | x | x | x | x | x | x | x | x |
| EGF | x | x | x | x | x | x | x | x |
| SIRP1α | x | x | x | x | x | x | x | x |
| Lewis-Y | x | x | x | x | x | x | x | x |
| LIV-1 | x | x | x | x | x | x | x | x |
| (SLC39A6) | | | | | | | | |
| Livin | x | x | x | x | x | x | x | x |
| LAMP1 | x | x | x | x | x | x | x | x |
| MAGEA3 | x | x | x | x | x | x | x | x |
| MAGEA4 | x | x | x | x | x | x | x | x |
| MAGEB6 | x | x | x | x | x | x | x | x |
| MAGEA1 | x | x | x | x | x | x | x | x |
| MART-1 | x | x | x | x | x | x | x | x |
| MCSP | x | x | x | x | x | x | x | x |
| MME | x | x | x | x | x | x | x | x |
| mesothelin | x | x | x | x | x | x | x | x |
| (MSLN) | | | | | | | | |
| MAPK1 | x | x | x | x | x | x | x | x |
| MUC16 | x | x | x | x | x | x | x | x |
| MUC1 | x | x | x | x | x | x | x | x |
| MRP-3 | x | x | x | x | x | x | x | x |
| MyoD-1 | x | x | x | x | x | x | x | x |
| NCAM | x | x | x | x | x | x | x | x |
| nectin 4 | x | x | x | x | x | x | x | x |
| Nestin | x | x | x | x | x | x | x | x |
| NEP | x | x | x | x | x | x | x | x |
| NY-ESO-1 | x | x | x | x | x | x | x | x |
| hHLA-A | x | x | x | x | x | x | x | x |
| H60 | x | x | x | x | x | x | x | x |
| OLIG2 | x | x | x | x | x | x | x | x |
| 5T4 | x | x | x | x | x | x | x | x |
| p53 | x | x | x | x | x | x | x | x |
| P-Cadherin | x | x | x | x | x | x | x | x |
| PB | x | x | x | x | x | x | x | x |
| P- | x | x | x | x | x | x | x | x |
| glycoprotein | | | | | | | | |
| PMCT | x | x | x | x | x | x | x | x |
| (SLC13A5) | | | | | | | | |
| PRAME | x | x | x | x | x | x | x | x |
| PROX1 | x | x | x | x | x | x | x | x |
| PSA | x | x | x | x | x | x | x | x |
| PSCA | x | x | x | x | x | x | x | x |
| PSMA | x | x | x | x | x | x | x | x |
| PSC1 | x | x | x | x | x | x | x | x |
| PVRL4 | x | x | x | x | x | x | x | x |
| Ras | x | x | x | x | x | x | x | x |
| ROR1 | x | x | x | x | x | x | x | x |
| SART2 | x | x | x | x | x | x | x | x |
| SART3 | x | x | x | x | x | x | x | x |
| oncofetal | x | x | x | x | x | x | x | x |
| variants of | | | | | | | | |
| fibronectin | | | | | | | | |
| tenascin | x | x | x | x | x | x | x | x |
| LICAM | x | x | x | x | x | x | x | x |
| Rae-1α | x | x | x | x | x | x | x | x |
| Rae-1β | x | x | x | x | x | x | x | x |
| Rae-1δ | x | x | x | x | x | x | x | x |
| Rae-1γ | x | x | x | x | x | x | x | x |
| PDGF | x | x | x | x | x | x | x | x |
| Fas | x | x | x | x | x | x | x | x |
| SOX2 | x | x | x | x | x | x | x | x |
| STEAP1 | x | x | x | x | x | x | x | x |
| SLITRK6 | x | x | x | x | x | x | x | x |
| NaPi2a | x | x | x | x | x | x | x | x |
| SOX1 | x | x | x | x | x | x | x | x |
| SOX11 | x | x | x | x | x | x | x | x |
| SPANXA1 | x | x | x | x | x | x | x | x |
| SART-1 | x | x | x | x | x | x | x | x |
| SSX4 | x | x | x | x | x | x | x | x |
| SSX5 | x | x | x | x | x | x | x | x |
| Survivin | x | x | x | x | x | x | x | x |
| SSX2 | x | x | x | x | x | x | x | x |
| TAG72 | x | x | x | x | x | x | x | x |
| TEM1 | x | x | x | x | x | x | x | x |
| TEM8 | x | x | x | x | x | x | x | x |
| TSGA10 | x | x | x | x | x | x | x | x |
| TSSK6 | x | x | x | x | x | x | x | x |
| thyroglobulin | x | x | x | x | x | x | x | x |
| transferrin | x | x | x | x | x | x | x | x |
| receptor | | | | | | | | |
| TACSTD2 | x | x | x | x | x | x | x | x |
| (TROP2) | | | | | | | | |
| TMEM97 | x | x | x | x | x | x | x | x |
| TRP-2 | x | x | x | x | x | x | x | x |
| TULP2 | x | x | x | x | x | x | x | x |
| TROP2 | x | x | x | x | x | x | x | x |
| tyrosinase | x | x | x | x | x | x | x | x |
| TRP1 | x | x | x | x | x | x | x | x |
| UPAR | x | x | x | x | x | x | x | x |
| VEGF | x | x | x | x | x | x | x | x |
| VEGF | x | x | x | x | x | x | x | x |
| receptors | | | | | | | | |
| VEGRR2 | x | x | x | x | x | x | x | x |
| BRAF | x | x | x | x | x | x | x | x |
| WT-1 | x | x | x | x | x | x | x | x |
| XAGE2 | x | x | x | x | x | x | x | x |
| ZNF165 | x | x | x | x | x | x | x | x |
| αvβ6 integrin | x | x | x | x | x | x | x | x |
| β-catenin | x | x | x | x | x | x | x | x |
| cathepsin B | x | x | x | x | x | x | x | x |
| CSAG2 | x | x | x | x | x | x | x | x |
| CTAG | x | x | x | x | x | x | x | x |
| EGFR | x | x | x | x | x | x | x | x |
| EGP40 | x | x | x | x | x | x | x | x |
| EZH2 | x | x | x | x | x | x | x | x |
| HIV sp120 | x | x | x | x | x | x | x | x |
| kappa light | x | x | x | x | x | x | x | x |
| chain | | | | | | | | |
| LDHC | x | x | x | x | x | x | x | x |
| TRP-1 | x | x | x | x | x | x | x | x |
| Fas-L | x | x | x | x | x | x | x | x |
| DLL3 | x | x | x | x | x | x | x | x |
| MAGEA12 | x | x | x | x | x | x | x | x |
| MAGEC2 | x | x | x | x | x | x | x | x |
| BAGE | x | x | x | x | x | x | x | x |
| BAGE1 | x | x | x | x | x | x | x | x |
| GAGE | x | x | x | x | x | x | x | x |
| XAGE | x | x | x | x | x | x | x | x |
| XAGE1B | x | x | x | x | x | x | x | x |
| SSX | x | x | x | x | x | x | x | x |
| SSX2 | x | x | x | x | x | x | x | x |
| KKLC1 | x | x | x | x | x | x | x | x |
| SAGE | x | x | x | x | x | x | x | x |
| SPA17 | x | x | x | x | x | x | x | x |
| Cyclin A | x | x | x | x | x | x | x | x |
| KMHN1 | x | x | x | x | x | x | x | x |
| | CD38 | CD40 | CD57 | CD69 | CD70 | CD73 | CD81 | CD82 |
| 8H9 | x | x | x | x | x | x | x | x |
| GnT-V,β1,6- | x | x | x | x | x | x | x | x |
| N | | | | | | | | |
| AFP | x | x | x | x | x | x | x | x |
| ART1 | x | x | x | x | x | x | x | x |
| ART4 | x | x | x | x | x | x | x | x |
| ABCG2 | x | x | x | x | x | x | x | x |
| B7-H3 | x | x | x | x | x | x | x | x |
| B7-H4 | x | x | x | x | x | x | x | x |
| B7-H6 | x | x | x | x | x | x | x | x |
| BCMA | x | x | x | x | x | x | x | x |
| B-cyclin | x | x | x | x | x | x | x | x |
| BMI1 | x | x | x | x | x | x | x | x |
| CA-125 | x | x | x | x | x | x | x | x |
| cadherin | x | x | x | x | x | x | x | x |
| CABYR | x | x | x | x | x | x | x | x |
| CTAG2 | x | x | x | x | x | x | x | x |
| CA6 | x | x | x | x | x | x | x | x |
| CAIX | x | x | x | x | x | x | x | x |
| CEA | x | x | x | x | x | x | x | x |
| CEACAM5 | x | x | x | x | x | x | x | x |
| CEACAM6 | x | x | x | x | x | x | x | x |
| Cav-1 | x | x | x | x | x | x | x | x |
| CD10 | x | x | x | x | x | x | x | x |
| CD117 | x | x | x | x | x | x | x | x |
| CD123 | x | x | x | x | x | x | x | x |
| CD133 | x | x | x | x | x | x | x | x |
| CD138 | x | x | x | x | x | x | x | x |
| CD15 | x | x | x | x | x | x | x | x |
| CD171 | x | x | x | x | x | x | x | x |
| CD19 | x | x | x | x | x | x | x | x |
| CD20 | x | x | x | x | x | x | x | x |
| CD21 | x | x | x | x | x | x | x | x |
| CD22 | x | x | x | x | x | x | x | x |
| CD30 | x | x | x | x | x | x | x | x |
| CD33 | x | x | x | x | x | x | x | x |
| CD37 | x | x | x | x | x | x | x | x |
| CD38 | x | x | x | x | x | x | x | x |
| CD44v6 | x | x | x | x | x | x | x | x |
| CD44v7/8 | x | x | x | x | x | x | x | x |
| CD74 | x | x | x | x | x | x | x | x |
| Cd79b | x | x | x | x | x | x | x | x |
| CD124 (IL- | x | x | x | x | x | x | x | x |
| 4R) | | | | | | | | |
| CDH3 | x | x | x | x | x | x | x | x |
| Ki-67 | x | x | x | x | x | x | x | x |
| CSPG4 | x | x | x | x | x | x | x | x |
| CALLA | x | x | x | x | x | x | x | x |
| CSAG2 | x | x | x | x | x | x | x | x |
| COX-2 | x | x | x | x | x | x | x | x |
| Lambda | x | x | x | x | x | x | x | x |
| LAYN | x | x | x | x | x | x | x | x |
| LeuM-1 | x | x | x | x | x | x | x | x |
| KDR | x | x | x | x | x | x | x | x |
| CD47 | x | x | x | x | x | x | x | x |
| CRISP3 | x | x | x | x | x | x | x | x |
| DC-SIGN | x | x | x | x | x | x | x | x |
| DHFR | x | x | x | x | x | x | x | x |
| EGP40 | x | x | x | x | x | x | x | x |
| EZH2 | x | x | x | x | x | x | x | x |
| EpCAM | x | x | x | x | x | x | x | x |
| EphA2 | x | x | x | x | x | x | x | x |
| EphA2/Eck | x | x | x | x | x | x | x | x |
| EGFRvIII | x | x | x | x | x | x | x | x |
| E-cadherin | x | x | x | x | x | x | x | x |
| EGP2 | x | x | x | x | x | x | x | x |
| ETA | x | x | x | x | x | x | x | x |
| ERBB3 | x | x | x | x | x | x | x | x |
| ERBB3/4 | x | x | x | x | x | x | x | x |
| ERBB4 | x | x | x | x | x | x | x | x |
| EPO | x | x | x | x | x | x | x | x |
| F3 | x | x | x | x | x | x | x | x |
| FAR | x | x | x | x | x | x | x | x |
| FBP | x | x | x | x | x | x | x | x |
| FTHL17 | x | x | x | x | x | x | x | x |
| fetal AchR | x | x | x | x | x | x | x | x |
| FAP | x | x | x | x | x | x | x | x |
| FGFR3 | x | x | x | x | x | x | x | x |
| FR-a | x | x | x | x | x | x | x | x |
| Fra-1/Fosl 1 | x | x | x | x | x | x | x | x |
| GAGE1 | x | x | x | x | x | x | x | x |
| GD2 | x | x | x | x | x | x | x | x |
| GD3 | x | x | x | x | x | x | x | x |
| Glil | x | x | x | x | x | x | x | x |
| GP100 | x | x | x | x | x | x | x | x |
| GPA33 | x | x | x | x | x | x | x | x |
| Glypican-3 | x | x | x | x | x | x | x | x |
| HIV gp120 | x | x | x | x | x | x | x | x |
| HLA-A | x | x | x | x | x | x | x | x |
| HLA-A2 | x | x | x | x | x | x | x | x |
| HLA-AI | x | x | x | x | x | x | x | x |
| HLA-B | x | x | x | x | x | x | x | x |
| HLA-C | x | x | x | x | x | x | x | x |
| HMW-MAA | x | x | x | x | x | x | x | x |
| Her2/Neu | x | x | x | x | x | x | x | x |
| Her3 | x | x | x | x | x | x | x | x |
| u70/80 | x | x | x | x | x | x | x | x |
| LICAM | x | x | x | x | x | x | x | x |
| ULBP1 | x | x | x | x | x | x | x | x |
| ULBP2 | x | x | x | x | x | x | x | x |
| ULBP3 | x | x | x | x | x | x | x | x |
| ULBP6 | x | x | x | x | x | x | x | x |
| MICA | x | x | x | x | x | x | x | x |
| MICB | x | x | x | x | x | x | x | x |
| Her3 | x | x | x | x | x | x | x | x |
| EGF | x | x | x | x | x | x | x | x |
| SIRP1α | x | x | x | x | x | x | x | x |
| Lewis-Y | x | x | x | x | x | x | x | x |
| LIV-1 | x | x | x | x | x | x | x | x |
| (SLC39A6) | | | | | | | | |
| Livin | x | x | x | x | x | x | x | x |
| LAMP1 | x | x | x | x | x | x | x | x |
| MAGEA3 | x | x | x | x | x | x | x | x |
| MAGEA4 | x | x | x | x | x | x | x | x |
| MAGEB6 | x | x | x | x | x | x | x | x |
| MAGEA1 | x | x | x | x | x | x | x | x |
| MART-1 | x | x | x | x | x | x | x | x |
| MCSP | x | x | x | x | x | x | x | x |
| MME | x | x | x | x | x | x | x | x |
| mesothelin | x | x | x | x | x | x | x | x |
| (MSLN) | | | | | | | | |
| MAPK1 | x | x | x | x | x | x | x | x |
| MUC16 | x | x | x | x | x | x | x | x |
| MUC1 | x | x | x | x | x | x | x | x |
| MRP-3 | x | x | x | x | x | x | x | x |
| MyoD-1 | x | x | x | x | x | x | x | x |
| NCAM | x | x | x | x | x | x | x | x |
| nectin 4 | x | x | x | x | x | x | x | x |
| Nestin | x | x | x | x | x | x | x | x |
| NEP | x | x | x | x | x | x | x | x |
| NY-ESO-1 | x | x | x | x | x | x | x | x |
| hHLA-A | x | x | x | x | x | x | x | x |
| H60 | x | x | x | x | x | x | x | x |
| OLIG2 | x | x | x | x | x | x | x | x |
| 5T4 | x | x | x | x | x | x | x | x |
| p53 | x | x | x | x | x | x | x | x |
| P-Cadherin | x | x | x | x | x | x | x | x |
| PB | x | x | x | x | x | x | x | x |
| P- | x | x | x | x | x | x | x | x |
| glycoprotein | | | | | | | | |
| PMCT | x | x | x | x | x | x | x | x |
| (SLC13A5) | | | | | | | | |
| PRAME | x | x | x | x | x | x | x | x |
| PROX1 | x | x | x | x | x | x | x | x |
| PSA | x | x | x | x | x | x | x | x |
| PSCA | x | x | x | x | x | x | x | x |
| PSMA | x | x | x | x | x | x | x | x |
| PSC1 | x | x | x | x | x | x | x | x |
| PVRL4 | x | x | x | x | x | x | x | x |
| Ras | x | x | x | x | x | x | x | x |
| ROR1 | x | x | x | x | x | x | x | x |
| SART2 | x | x | x | x | x | x | x | x |
| SART3 | x | x | x | x | x | x | x | x |
| oncofetal | x | x | x | x | x | x | x | x |
| variants of | | | | | | | | |
| fibronectin | | | | | | | | |
| tenascin | x | x | x | x | x | x | x | x |
| LICAM | x | x | x | x | x | x | x | x |
| Rae-1α | x | x | x | x | x | x | x | x |
| Rae-1β | x | x | x | x | x | x | x | x |
| Rae-1δ | x | x | x | x | x | x | x | x |
| Rae-1γ | x | x | x | x | x | x | x | x |
| PDGF | x | x | x | x | x | x | x | x |
| Fas | x | x | x | x | x | x | x | x |
| SOX2 | x | x | x | x | x | x | x | x |
| STEAP1 | x | x | x | x | x | x | x | x |
| SLITRK6 | x | x | x | x | x | x | x | x |
| NaPi2a | x | x | x | x | x | x | x | x |
| SOX1 | x | x | x | x | x | x | x | x |
| SOX11 | x | x | x | x | x | x | x | x |
| SPANXA1 | x | x | x | x | x | x | x | x |
| SART-1 | x | x | x | x | x | x | x | x |
| SSX4 | x | x | x | x | x | x | x | x |
| SSX5 | x | x | x | x | x | x | x | x |
| Survivin | x | x | x | x | x | x | x | x |
| SSX2 | x | x | x | x | x | x | x | x |
| TAG72 | x | x | x | x | x | x | x | x |
| TEM1 | x | x | x | x | x | x | x | x |
| TEM8 | x | x | x | x | x | x | x | x |
| TSGA10 | x | x | x | x | x | x | x | x |
| TSSK6 | x | x | x | x | x | x | x | x |
| thyroglobulin | x | x | x | x | x | x | x | x |
| transferrin | x | x | x | x | x | x | x | x |
| receptor | | | | | | | | |
| TACSTD2 | x | x | x | x | x | x | x | x |
| (TROP2) | | | | | | | | |
| TMEM97 | x | x | x | x | x | x | x | x |
| TRP-2 | x | x | x | x | x | x | x | x |
| TULP2 | x | x | x | x | x | x | x | x |
| TROP2 | x | x | x | x | x | x | x | x |
| tyrosinase | x | x | x | x | x | x | x | x |
| TRP1 | x | x | x | x | x | x | x | x |
| UPAR | x | x | x | x | x | x | x | x |
| VEGF | x | x | x | x | x | x | x | x |
| VEGF | x | x | x | x | x | x | x | x |
| receptors | | | | | | | | |
| VEGRR2 | x | x | x | x | x | x | x | x |
| BRAF | x | x | x | x | x | x | x | x |
| WT-1 | x | x | x | x | x | x | x | x |
| XAGE2 | x | x | x | x | x | x | x | x |
| ZNF165 | x | x | x | x | x | x | x | x |
| αvβ6 integrin | x | x | x | x | x | x | x | x |
| β-catenin | x | x | x | x | x | x | x | x |
| cathepsin B | x | x | x | x | x | x | x | x |
| CSAG2 | x | x | x | x | x | x | x | x |
| CTAG | x | x | x | x | x | x | x | x |
| EGFR | x | x | x | x | x | x | x | x |
| EGP40 | x | x | x | x | x | x | x | x |
| EZH2 | x | x | x | x | x | x | x | x |
| HIV sp120 | x | x | x | x | x | x | x | x |
| kappa light | x | x | x | x | x | x | x | x |
| chain | | | | | | | | |
| LDHC | x | x | x | x | x | x | x | x |
| TRP-1 | x | x | x | x | x | x | x | x |
| Fas-L | x | x | x | x | x | x | x | x |
| DLL3 | x | x | x | x | x | x | x | x |
| MAGEA12 | x | x | x | x | x | x | x | x |
| MAGEC2 | x | x | x | x | x | x | x | x |
| BAGE | x | x | x | x | x | x | x | x |
| BAGE1 | x | x | x | x | x | x | x | x |
| GAGE | x | x | x | x | x | x | x | x |
| XAGE | x | x | x | x | x | x | x | x |
| XAGEIB | x | x | x | x | x | x | x | x |
| SSX | x | x | x | x | x | x | x | x |
| SSX2 | x | x | x | x | x | x | x | x |
| KKLC1 | x | x | x | x | x | x | x | x |
| SAGE | x | x | x | x | x | x | x | x |
| SPA17 | x | x | x | x | x | x | x | x |
| Cyclin A | x | x | x | x | x | x | x | x |
| KMHN1 | x | x | x | x | x | x | x | x |
| | | | | | | | CD94/ | |
| | | | | | | | NKG2 | |
| | | | | | | invariant | (e.g., | |
| | CD96 | CD134 | CD137 | CD152 | CD278 | TCR | NKG2D) | NKp30 |
| 8H9 | x | x | x | x | x | x | x | x |
| GnT-V,β1,6- | x | x | x | x | x | x | x | x |
| N | | | | | | | | |
| AFP | x | x | x | x | x | x | x | x |
| ART1 | x | x | x | x | x | x | x | x |
| ART4 | x | x | x | x | x | x | x | x |
| ABCG2 | x | x | x | x | x | x | x | x |
| B7-H3 | x | x | x | x | x | x | x | x |
| B7-H4 | x | x | x | x | x | x | x | x |
| B7-H6 | x | x | x | x | x | x | x | x |
| BCMA | x | x | x | x | x | x | x | x |
| B-cyclin | x | x | x | x | x | x | x | x |
| BMI1 | x | x | x | x | x | x | x | x |
| CA-125 | x | x | x | x | x | x | x | x |
| cadherin | x | x | x | x | x | x | x | x |
| CABYR | x | x | x | x | x | x | x | x |
| CTAG2 | x | x | x | x | x | x | x | x |
| CA6 | x | x | x | x | x | x | x | x |
| CAIX | x | x | x | x | x | x | x | x |
| CEA | x | x | x | x | x | x | x | x |
| CEACAM5 | x | x | x | x | x | x | x | x |
| CEACAM6 | x | x | x | x | x | x | x | x |
| Cav-1 | x | x | x | x | x | x | x | x |
| CD10 | x | x | x | x | x | x | x | x |
| CD117 | x | x | x | x | x | x | x | x |
| CD123 | x | x | x | x | x | x | x | x |
| CD133 | x | x | x | x | x | x | x | x |
| CD138 | x | x | x | x | x | x | x | x |
| CD15 | x | x | x | x | x | x | x | x |
| CD171 | x | x | x | x | x | x | x | x |
| CD19 | x | x | x | x | x | x | x | x |
| CD20 | x | x | x | x | x | x | x | x |
| CD21 | x | x | x | x | x | x | x | x |
| CD22 | x | x | x | x | x | x | x | x |
| CD30 | x | x | x | x | x | x | x | x |
| CD33 | x | x | x | x | x | x | x | x |
| CD37 | x | x | x | x | x | x | x | x |
| CD38 | x | x | x | x | x | x | x | x |
| CD44v6 | x | x | x | x | x | x | x | x |
| CD44v7/8 | x | x | x | x | x | x | x | x |
| CD74 | x | x | x | x | x | x | x | x |
| Cd79b | x | x | x | x | x | x | x | x |
| CD124 (IL- | x | x | x | x | x | x | x | x |
| 4R) | | | | | | | | |
| CDH3 | x | x | x | x | x | x | x | x |
| Ki-67 | x | x | x | x | x | x | x | x |
| CSPG4 | x | x | x | x | x | x | x | x |
| CALLA | x | x | x | x | x | x | x | x |
| CSAG2 | x | x | x | x | x | x | x | x |
| COX-2 | x | x | x | x | x | x | x | x |
| Lambda | x | x | x | x | x | x | x | x |
| LAYN | x | x | x | x | x | x | x | x |
| LeuM-1 | x | x | x | x | x | x | x | x |
| KDR | x | x | x | x | x | x | x | x |
| CD47 | x | x | x | x | x | x | x | x |
| CRISP3 | x | x | x | x | x | x | x | x |
| DC-SIGN | x | x | x | x | x | x | x | x |
| DHFR | x | x | x | x | x | x | x | x |
| EGP40 | x | x | x | x | x | x | x | x |
| EZH2 | x | x | x | x | x | x | x | x |
| EpCAM | x | x | x | x | x | x | x | x |
| EphA2 | x | x | x | x | x | x | x | x |
| EphA2/Eck | x | x | x | x | x | x | x | x |
| EGFRvIII | x | x | x | x | x | x | x | x |
| E-cadherin | x | x | x | x | x | x | x | x |
| EGP2 | x | x | x | x | x | x | x | x |
| ETA | x | x | x | x | x | x | x | x |
| ERBB3 | x | x | x | x | x | x | x | x |
| ERBB3/4 | x | x | x | x | x | x | x | x |
| ERBB4 | x | x | x | x | x | x | x | x |
| EPO | x | x | x | x | x | x | x | x |
| F3 | x | x | x | x | x | x | x | x |
| FAR | x | x | x | x | x | x | x | x |
| FBP | x | x | x | x | x | x | x | x |
| FTHL17 | x | x | x | x | x | x | x | x |
| fetal AchR | x | x | x | x | x | x | x | x |
| FAP | x | x | x | x | x | x | x | x |
| FGFR3 | x | x | x | x | x | x | x | x |
| FR-a | x | x | x | x | x | x | x | x |
| Fra-1/Fosl 1 | x | x | x | x | x | x | x | x |
| GAGE1 | x | x | x | x | x | x | x | x |
| GD2 | x | x | x | x | x | x | x | x |
| GD3 | x | x | x | x | x | x | x | x |
| Glil | x | x | x | x | x | x | x | x |
| GP100 | x | x | x | x | x | x | x | x |
| GPA33 | x | x | x | x | x | x | x | x |
| Glypican-3 | x | x | x | x | x | x | x | x |
| HIV gp120 | x | x | x | x | x | x | x | x |
| HLA-A | x | x | x | x | x | x | x | x |
| HLA-A2 | x | x | x | x | x | x | x | x |
| HLA-AI | x | x | x | x | x | x | x | x |
| HLA-B | x | x | x | x | x | x | x | x |
| HLA-C | x | x | x | x | x | x | x | x |
| HMW-MAA | x | x | x | x | x | x | x | x |
| Her2/Neu | x | x | x | x | x | x | x | x |
| Her3 | x | x | x | x | x | x | x | x |
| u70/80 | x | x | x | x | x | x | x | x |
| LICAM | x | x | x | x | x | x | x | x |
| ULBP1 | x | x | x | x | x | x | x | x |
| ULBP2 | x | x | x | x | x | x | x | x |
| ULBP3 | x | x | x | x | x | x | x | x |
| ULBP6 | x | x | x | x | x | x | x | x |
| MICA | x | x | x | x | x | x | x | x |
| MICB | x | x | x | x | x | x | x | x |
| Her3 | x | x | x | x | x | x | x | x |
| EGF | x | x | x | x | x | x | x | x |
| SIRP1α | x | x | x | x | x | x | x | x |
| Lewis-Y | x | x | x | x | x | x | x | x |
| LIV-1 | x | x | x | x | x | x | x | x |
| (SLC39A6) | | | | | | | | |
| Livin | x | x | x | x | x | x | x | x |
| LAMP1 | x | x | x | x | x | x | x | x |
| MAGEA3 | x | x | x | x | x | x | x | x |
| MAGEA4 | x | x | x | x | x | x | x | x |
| MAGEB6 | x | x | x | x | x | x | x | x |
| MAGEA1 | x | x | x | x | x | x | x | x |
| MART-1 | x | x | x | x | x | x | x | x |
| MCSP | x | x | x | x | x | x | x | x |
| MME | x | x | x | x | x | x | x | x |
| mesothelin | x | x | x | x | x | x | x | x |
| (MSLN) | | | | | | | | |
| MAPK1 | x | x | x | x | x | x | x | x |
| MUC16 | x | x | x | x | x | x | x | x |
| MUC1 | x | x | x | x | x | x | x | x |
| MRP-3 | x | x | x | x | x | x | x | x |
| MyoD-1 | x | x | x | x | x | x | x | x |
| NCAM | x | x | x | x | x | x | x | x |
| nectin 4 | x | x | x | x | x | x | x | x |
| Nestin | x | x | x | x | x | x | x | x |
| NEP | x | x | x | x | x | x | x | x |
| NY-ESO-1 | x | x | x | x | x | x | x | x |
| hHLA-A | x | x | x | x | x | x | x | x |
| H60 | x | x | x | x | x | x | x | x |
| OLIG2 | x | x | x | x | x | x | x | x |
| 5T4 | x | x | x | x | x | x | x | x |
| p53 | x | x | x | x | x | x | x | x |
| P-Cadherin | x | x | x | x | x | x | x | x |
| PB | x | x | x | x | x | x | x | x |
| P- | x | x | x | x | x | x | x | x |
| glycoprotein | | | | | | | | |
| PMCT | x | x | x | x | x | x | x | x |
| (SLC13A5) | | | | | | | | |
| PRAME | x | x | x | x | x | x | x | x |
| PROXI | x | x | x | x | x | x | x | x |
| PSA | x | x | x | x | x | x | x | x |
| PSCA | x | x | x | x | x | x | x | x |
| PSMA | x | x | x | x | x | x | x | x |
| PSC1 | x | x | x | x | x | x | x | x |
| PVRL4 | x | x | x | x | x | x | x | x |
| Ras | x | x | x | x | x | x | x | x |
| ROR1 | x | x | x | x | x | x | x | x |
| SART2 | x | x | x | x | x | x | x | x |
| SART3 | x | x | x | x | x | x | x | x |
| oncofetal | x | x | x | x | x | x | x | x |
| variants of | | | | | | | | |
| fibronectin | | | | | | | | |
| tenascin | x | x | x | x | x | x | x | x |
| LICAM | x | x | x | x | x | x | x | x |
| Rae-1α | x | x | x | x | x | x | x | x |
| Rae-1β | x | x | x | x | x | x | x | x |
| Rae-1δ | x | x | x | x | x | x | x | x |
| Rae-1γ | x | x | x | x | x | x | x | x |
| PDGF | x | x | x | x | x | x | x | x |
| Fas | x | x | x | x | x | x | x | x |
| SOX2 | x | x | x | x | x | x | x | x |
| STEAP1 | x | x | x | x | x | x | x | x |
| SLITRK6 | x | x | x | x | x | x | x | x |
| NaPi2a | x | x | x | x | x | x | x | x |
| SOX1 | x | x | x | x | x | x | x | x |
| SOX11 | x | x | x | x | x | x | x | x |
| SPANXA1 | x | x | x | x | x | x | x | x |
| SART-1 | x | x | x | x | x | x | x | x |
| SSX4 | x | x | x | x | x | x | x | x |
| SSX5 | x | x | x | x | x | x | x | x |
| Survivin | x | x | x | x | x | x | x | x |
| SSX2 | x | x | x | x | x | x | x | x |
| TAG72 | x | x | x | x | x | x | x | x |
| TEM1 | x | x | x | x | x | x | x | x |
| TEM8 | x | x | x | x | x | x | x | x |
| TSGA10 | x | x | x | x | x | x | x | x |
| TSSK6 | x | x | x | x | x | x | x | x |
| thyroglobulin | x | x | x | x | x | x | x | x |
| transferrin | x | x | x | x | x | x | x | x |
| receptor | | | | | | | | |
| TACSTD2 | x | x | x | x | x | x | x | x |
| (TROP2) | | | | | | | | |
| TMEM97 | x | x | x | x | x | x | x | x |
| TRP-2 | x | x | x | x | x | x | x | x |
| TULP2 | x | x | x | x | x | x | x | x |
| TROP2 | x | x | x | x | x | x | x | x |
| tyrosinase | x | x | x | x | x | x | x | x |
| TRP1 | x | x | x | x | x | x | x | x |
| UPAR | x | x | x | x | x | x | x | x |
| VEGF | x | x | x | x | x | x | x | x |
| VEGF | x | x | x | x | x | x | x | x |
| receptors | | | | | | | | |
| VEGRR2 | x | x | x | x | x | x | x | x |
| BRAF | x | x | x | x | x | x | x | x |
| WT-1 | x | x | x | x | x | x | x | x |
| XAGE2 | x | x | x | x | x | x | x | x |
| ZNF165 | x | x | x | x | x | x | x | x |
| αvβ6 integrin | x | x | x | x | x | x | x | x |
| β-catenin | x | x | x | x | x | x | x | x |
| cathepsin B | x | x | x | x | x | x | x | x |
| CSAG2 | x | x | x | x | x | x | x | x |
| CTAG | x | x | x | x | x | x | x | x |
| EGFR | x | x | x | x | x | x | x | x |
| EGP40 | x | x | x | x | x | x | x | x |
| EZH2 | x | x | x | x | x | x | x | x |
| HIV sp120 | x | x | x | x | x | x | x | x |
| kappa light | x | x | x | x | x | x | x | x |
| chain | | | | | | | | |
| LDHC | x | x | x | x | x | x | x | x |
| TRP-1 | x | x | x | x | x | x | x | x |
| Fas-L | x | x | x | x | x | x | x | x |
| DLL3 | x | x | x | x | x | x | x | x |
| MAGEA12 | x | x | x | x | x | x | x | x |
| MAGEC2 | x | x | x | x | x | x | x | x |
| BAGE | x | x | x | x | x | x | x | x |
| BAGE1 | x | x | x | x | x | x | x | x |
| GAGE | x | x | x | x | x | x | x | x |
| XAGE | x | x | x | x | x | x | x | x |
| XAGE1B | x | x | x | x | x | x | x | x |
| SSX | x | x | x | x | x | x | x | x |
| SSX2 | x | x | x | x | x | x | x | x |
| KKLC1 | x | x | x | x | x | x | x | x |
| SAGE | x | x | x | x | x | x | x | x |
| SPA17 | x | x | x | x | x | x | x | x |
| Cyclin A | x | x | x | x | x | x | x | x |
| KMHN1 | x | x | x | x | x | x | x | x |
| | | | | | | | | IL- |
| | NKp44 | NKp46 | KARs | CD48 | LIGHT | CD44 | CD45 | 1R2 |
| 8H9 | x | x | x | x | x | x | x | x |
| GnT-V,β1,6- | x | x | x | x | x | x | x | x |
| N | | | | | | | | |
| AFP | x | x | x | x | x | x | x | x |
| ART1 | x | x | x | x | x | x | x | x |
| ART4 | x | x | x | x | x | x | x | x |
| ABCG2 | x | x | x | x | x | x | x | x |
| B7-H3 | x | x | x | x | x | x | x | x |
| B7-H4 | x | x | x | x | x | x | x | x |
| B7-H6 | x | x | x | x | x | x | x | x |
| BCMA | x | x | x | x | x | x | x | x |
| B-cyclin | x | x | x | x | x | x | x | x |
| BMI1 | x | x | x | x | x | x | x | x |
| CA-125 | x | x | x | x | x | x | x | x |
| cadherin | x | x | x | x | x | x | x | x |
| CABYR | x | x | x | x | x | x | x | x |
| CTAG2 | x | x | x | x | x | x | x | x |
| CA6 | x | x | x | x | x | x | x | x |
| CAIX | x | x | x | x | x | x | x | x |
| CEA | x | x | x | x | x | x | x | x |
| CEACAM5 | x | x | x | x | x | x | x | x |
| CEACAM6 | x | x | x | x | x | x | x | x |
| Cav-1 | x | x | x | x | x | x | x | x |
| CD10 | x | x | x | x | x | x | x | x |
| CD117 | x | x | x | x | x | x | x | x |
| CD123 | x | x | x | x | x | x | x | x |
| CD133 | x | x | x | x | x | x | x | x |
| CD138 | x | x | x | x | x | x | x | x |
| CD15 | x | x | x | x | x | x | x | x |
| CD171 | x | x | x | x | x | x | x | x |
| CD19 | x | x | x | x | x | x | x | x |
| CD20 | x | x | x | x | x | x | x | x |
| CD21 | x | x | x | x | x | x | x | x |
| CD22 | x | x | x | x | x | x | x | x |
| CD30 | x | x | x | x | x | x | x | x |
| CD33 | x | x | x | x | x | x | x | x |
| CD37 | x | x | x | x | x | x | x | x |
| CD38 | x | x | x | x | x | x | x | x |
| CD44v6 | x | x | x | x | x | x | x | x |
| CD44v7/8 | x | x | x | x | x | x | x | x |
| CD74 | x | x | x | x | x | x | x | x |
| Cd79b | x | x | x | x | x | x | x | x |
| CD124 (IL- | x | x | x | x | x | x | x | x |
| 4R) | | | | | | | | |
| CDH3 | x | x | x | x | x | x | x | x |
| Ki-67 | x | x | x | x | x | x | x | x |
| CSPG4 | x | x | x | x | x | x | x | x |
| CALLA | x | x | x | x | x | x | x | x |
| CSAG2 | x | x | x | x | x | x | x | x |
| COX-2 | x | x | x | x | x | x | x | x |
| Lambda | x | x | x | x | x | x | x | x |
| LAYN | x | x | x | x | x | x | x | x |
| LeuM-1 | x | x | x | x | x | x | x | x |
| KDR | x | x | x | x | x | x | x | x |
| CD47 | x | x | x | x | x | x | x | x |
| CRISP3 | x | x | x | x | x | x | x | x |
| DC-SIGN | x | x | x | x | x | x | x | x |
| DHFR | x | x | x | x | x | x | x | x |
| EGP40 | x | x | x | x | x | x | x | x |
| EZH2 | x | x | x | x | x | x | x | x |
| EpCAM | x | x | x | x | x | x | x | x |
| EphA2 | x | x | x | x | x | x | x | x |
| EphA2/Eck | x | x | x | x | x | x | x | x |
| EGFRvIII | x | x | x | x | x | x | x | x |
| E-cadherin | x | x | x | x | x | x | x | x |
| EGP2 | x | x | x | x | x | x | x | x |
| ETA | x | x | x | x | x | x | x | x |
| ERBB3 | x | x | x | x | x | x | x | x |
| ERBB3/4 | x | x | x | x | x | x | x | x |
| ERBB4 | x | x | x | x | x | x | x | x |
| EPO | x | x | x | x | x | x | x | x |
| F3 | x | x | x | x | x | x | x | x |
| FAR | x | x | x | x | x | x | x | x |
| FBP | x | x | x | x | x | x | x | x |
| FTHL17 | x | x | x | x | x | x | x | x |
| fetal AchR | x | x | x | x | x | x | x | x |
| FAP | x | x | x | x | x | x | x | x |
| FGFR3 | x | x | x | x | x | x | x | x |
| FR-a | x | x | x | x | x | x | x | x |
| Fra-1/Fosl 1 | x | x | x | x | x | x | x | x |
| GAGE1 | x | x | x | x | x | x | x | x |
| GD2 | x | x | x | x | x | x | x | x |
| GD3 | x | x | x | x | x | x | x | x |
| Glil | x | x | x | x | x | x | x | x |
| GP100 | x | x | x | x | x | x | x | x |
| GPA33 | x | x | x | x | x | x | x | x |
| Glypican-3 | x | x | x | x | x | x | x | x |
| HIV gp120 | x | x | x | x | x | x | x | x |
| HLA-A | x | x | x | x | x | x | x | x |
| HLA-A2 | x | x | x | x | x | x | x | x |
| HLA-AI | x | x | x | x | x | x | x | x |
| HLA-B | x | x | x | x | x | x | x | x |
| HLA-C | x | x | x | x | x | x | x | x |
| HMW-MAA | x | x | x | x | x | x | x | x |
| Her2/Neu | x | x | x | x | x | x | x | x |
| Her3 | x | x | x | x | x | x | x | x |
| u70/80 | x | x | x | x | x | x | x | x |
| LICAM | x | x | x | x | x | x | x | x |
| ULBP1 | x | x | x | x | x | x | x | x |
| ULBP2 | x | x | x | x | x | x | x | x |
| ULBP3 | x | x | x | x | x | x | x | x |
| ULBP6 | x | x | x | x | x | x | x | x |
| MICA | x | x | x | x | x | x | x | x |
| MICB | x | x | x | x | x | x | x | x |
| Her3 | x | x | x | x | x | x | x | x |
| EGF | x | x | x | x | x | x | x | x |
| SIRP1α | x | x | x | x | x | x | x | x |
| Lewis-Y | x | x | x | x | x | x | x | x |
| LIV-1 | x | x | x | x | x | x | x | x |
| (SLC39A6) | | | | | | | | |
| Livin | x | x | x | x | x | x | x | x |
| LAMP1 | x | x | x | x | x | x | x | x |
| MAGEA3 | x | x | x | x | x | x | x | x |
| MAGEA4 | x | x | x | x | x | x | x | x |
| MAGEB6 | x | x | x | x | x | x | x | x |
| MAGEA1 | x | x | x | x | x | x | x | x |
| MART-1 | x | x | x | x | x | x | x | x |
| MCSP | x | x | x | x | x | x | x | x |
| MME | x | x | x | x | x | x | x | x |
| mesothelin | x | x | x | x | x | x | x | x |
| (MSLN) | | | | | | | | |
| MAPK1 | x | x | x | x | x | x | x | x |
| MUC16 | x | x | x | x | x | x | x | x |
| MUC1 | x | x | x | x | x | x | x | x |
| MRP-3 | x | x | x | x | x | x | x | x |
| MyoD-1 | x | x | x | x | x | x | x | x |
| NCAM | x | x | x | x | x | x | x | x |
| nectin 4 | x | x | x | x | x | x | x | x |
| Nestin | x | x | x | x | x | x | x | x |
| NEP | x | x | x | x | x | x | x | x |
| NY-ESO-1 | x | x | x | x | x | x | x | x |
| hHLA-A | x | x | x | x | x | x | x | x |
| H60 | x | x | x | x | x | x | x | x |
| OLIG2 | x | x | x | x | x | x | x | x |
| 5T4 | x | x | x | x | x | x | x | x |
| p53 | x | x | x | x | x | x | x | x |
| P-Cadherin | x | x | x | x | x | x | x | x |
| PB | x | x | x | x | x | x | x | x |
| P- | x | x | x | x | x | x | x | x |
| glycoprotein | | | | | | | | |
| PMCT | x | x | x | x | x | x | x | x |
| (SLC13A5) | | | | | | | | |
| PRAME | x | x | x | x | x | x | x | x |
| PROXI | x | x | x | x | x | x | x | x |
| PSA | x | x | x | x | x | x | x | x |
| PSCA | x | x | x | x | x | x | x | x |
| PSMA | x | x | x | x | x | x | x | x |
| PSC1 | x | x | x | x | x | x | x | x |
| PVRL4 | x | x | x | x | x | x | x | x |
| Ras | x | x | x | x | x | x | x | x |
| ROR1 | x | x | x | x | x | x | x | x |
| SART2 | x | x | x | x | x | x | x | x |
| SART3 | x | x | x | x | x | x | x | x |
| oncofetal | x | x | x | x | x | x | x | x |
| variants of | x | x | x | x | x | x | x | x |
| fibronectin | | | | | | | | |
| tenascin | | | | | | | | |
| LICAM | x | x | x | x | x | x | x | x |
| Rae-1α | x | x | x | x | x | x | x | x |
| Rae-1β | x | x | x | x | x | x | x | x |
| Rae-1δ | x | x | x | x | x | x | x | x |
| Rae-1γ | x | x | x | x | x | x | x | x |
| PDGF | x | x | x | x | x | x | x | x |
| Fas | x | x | x | x | x | x | x | x |
| SOX2 | x | x | x | x | x | x | x | x |
| STEAP1 | x | x | x | x | x | x | x | x |
| SLITRK6 | x | x | x | x | x | x | x | x |
| NaPi2a | x | x | x | x | x | x | x | x |
| SOX1 | x | x | x | x | x | x | x | x |
| SOX11 | x | x | x | x | x | x | x | x |
| SPANXA1 | x | x | x | x | x | x | x | x |
| SART-1 | x | x | x | x | x | x | x | x |
| SSX4 | x | x | x | x | x | x | x | x |
| SSX5 | x | x | x | x | x | x | x | x |
| Survivin | x | x | x | x | x | x | x | x |
| SSX2 | x | x | x | x | x | x | x | x |
| TAG72 | x | x | x | x | x | x | x | x |
| TEM1 | x | x | x | x | x | x | x | x |
| TEM8 | x | x | x | x | x | x | x | x |
| TSGA10 | x | x | x | x | x | x | x | x |
| TSSK6 | x | x | x | x | x | x | x | x |
| thyroglobulin | x | x | x | x | x | x | x | x |
| transferrin | x | x | x | x | x | x | x | x |
| receptor | | | | | | | | |
| TACSTD2 | x | x | x | x | x | x | x | x |
| (TROP2) | | | | | | | | |
| TMEM97 | x | x | x | x | x | x | x | x |
| TRP-2 | x | x | x | x | x | x | x | x |
| TULP2 | x | x | x | x | x | x | x | x |
| TROP2 | x | x | x | x | x | x | x | x |
| tyrosinase | x | x | x | x | x | x | x | x |
| TRP1 | x | x | x | x | x | x | x | x |
| UPAR | x | x | x | x | x | x | x | x |
| VEGF | x | x | x | x | x | x | x | x |
| VEGF | x | x | x | x | x | x | x | x |
| receptors | | | | | | | | |
| VEGRR2 | x | x | x | x | x | x | x | x |
| BRAF | x | x | x | x | x | x | x | x |
| WT-1 | x | x | x | x | x | x | x | x |
| XAGE2 | x | x | x | x | x | x | x | x |
| ZNF165 | x | x | x | x | x | x | x | x |
| αvβ6 integrin | x | x | x | x | x | x | x | x |
| β-catenin | x | x | x | x | x | x | x | x |
| cathepsin B | x | x | x | x | x | x | x | x |
| CSAG2 | x | x | x | x | x | x | x | x |
| CTAG | x | x | x | x | x | x | x | x |
| EGFR | x | x | x | x | x | x | x | x |
| EGP40 | x | x | x | x | x | x | x | x |
| EZH2 | x | x | x | x | x | x | x | x |
| HIV sp120 | x | x | x | x | x | x | x | x |
| kappa light | x | x | x | x | x | x | x | x |
| chain | | | | | | | | |
| LDHC | x | x | x | x | x | x | x | x |
| TRP-1 | x | x | x | x | x | x | x | x |
| Fas-L | x | x | x | x | x | x | x | x |
| DLL3 | x | x | x | x | x | x | x | x |
| MAGEA12 | x | x | x | x | x | x | x | x |
| MAGEC2 | x | x | x | x | x | x | x | x |
| BAGE | x | x | x | x | x | x | x | x |
| BAGE1 | x | x | x | x | x | x | x | x |
| GAGE | x | x | x | x | x | x | x | x |
| XAGE | x | x | x | x | x | x | x | x |
| XAGE1B | x | x | x | x | x | x | x | x |
| SSX | x | x | x | x | x | x | x | x |
| SSX2 | x | x | x | x | x | x | x | x |
| KKLC1 | x | x | x | x | x | x | x | x |
| SAGE | x | x | x | x | x | x | x | x |
| SPA17 | x | x | x | x | x | x | x | x |
| Cyclin A | x | x | x | x | x | x | x | x |
| KMHN1 | x | x | x | x | x | x | x | x |

| | IL- | IL- | IL- | IL- | | | |
|---|---|---|---|---|---|---|---|
| | 1Rα | IRα2 | 13Rα2 | 15Ra | CCR5 | CCR8 | SIRPα |
| 8H9 | x | x | x | x | x | x | x |
| GnT-V,β1,6- | x | x | x | x | x | x | x |
| N | | | | | | | |
| AFP | x | x | x | x | x | x | x |
| ART1 | x | x | x | x | x | x | x |
| ART4 | x | x | x | x | x | x | x |
| ABCG2 | x | x | x | x | x | x | x |
| B7-H3 | x | x | x | x | x | x | x |
| B7-H4 | x | x | x | x | x | x | x |
| B7-H6 | x | x | x | x | x | x | x |
| BCMA | x | x | x | x | x | x | x |
| B-cyclin | x | x | x | x | x | x | x |
| BMI1 | x | x | x | x | x | x | x |
| CA-125 | x | x | x | x | x | x | x |
| cadherin | x | x | x | x | x | x | x |
| CABYR | x | x | x | x | x | x | x |
| CTAG2 | x | x | x | x | x | x | x |
| CA6 | x | x | x | x | x | x | x |
| CAIX | x | x | x | x | x | x | x |
| CEA | x | x | x | x | x | x | x |
| CEACAM5 | x | x | x | x | x | x | x |
| CEACAM6 | x | x | x | x | x | x | x |
| Cav-1 | x | x | x | x | x | x | x |
| CD10 | x | x | x | x | x | x | x |
| CD117 | x | x | x | x | x | x | x |
| CD123 | x | x | x | x | x | x | x |
| CD133 | x | x | x | x | x | x | x |
| CD138 | x | x | x | x | x | x | x |
| CD15 | x | x | x | x | x | x | x |
| CD171 | x | x | x | x | x | x | x |
| CD19 | x | x | x | x | x | x | x |
| CD20 | x | x | x | x | x | x | x |
| CD21 | x | x | x | x | x | x | x |
| CD22 | x | x | x | x | x | x | x |
| CD30 | x | x | x | x | x | x | x |
| CD33 | x | x | x | x | x | x | x |
| CD37 | x | x | x | x | x | x | x |
| CD38 | x | x | x | x | x | x | x |
| CD44v6 | x | x | x | x | x | x | x |
| CD44v7/8 | x | x | x | x | x | x | x |
| CD74 | x | x | x | x | x | x | x |
| Cd79b | x | x | x | x | x | x | x |
| CD124 (IL- | x | x | x | x | x | x | x |
| 4R) | | | | | | | |
| CDH3 | x | x | x | x | x | x | x |
| Ki-67 | x | x | x | x | x | x | x |
| CSPG4 | x | x | x | x | x | x | x |
| CALLA | x | x | x | x | x | x | x |
| CSAG2 | x | x | x | x | x | x | x |
| COX-2 | x | x | x | x | x | x | x |
| Lambda | x | x | x | x | x | x | x |
| LAYN | x | x | x | x | x | x | x |
| LeuM-1 | x | x | x | x | x | x | x |
| KDR | x | x | x | x | x | x | x |
| CD47 | x | x | x | x | x | x | x |
| CRISP3 | x | x | x | x | x | x | x |
| DC-SIGN | x | x | x | x | x | x | x |
| DHFR | x | x | x | x | x | x | x |
| EGP40 | x | x | x | x | x | x | x |
| EZH2 | x | x | x | x | x | x | x |
| EpCAM | x | x | x | x | x | x | x |
| EphA2 | x | x | x | x | x | x | x |
| EphA2/Eck | x | x | x | x | x | x | x |
| EGFRvIII | x | x | x | x | x | x | x |
| E-cadherin | x | x | x | x | x | x | x |
| EGP2 | x | x | x | x | x | x | x |
| ETA | x | x | x | x | x | x | x |
| ERBB3 | x | x | x | x | x | x | x |
| ERBB3/4 | x | x | x | x | x | x | x |
| ERBB4 | x | x | x | x | x | x | x |
| EPO | x | x | x | x | x | x | x |
| F3 | x | x | x | x | x | x | x |
| FAR | x | x | x | x | x | x | x |
| FBP | x | x | x | x | x | x | x |
| FTHL17 | x | x | x | x | x | x | x |
| fetal AchR | x | x | x | x | x | x | x |
| FAP | x | x | x | x | x | x | x |
| FGFR3 | x | x | x | x | x | x | x |
| FR-a | x | x | x | x | x | x | x |
| Fra-1/Fosl 1 | x | x | x | x | x | x | x |
| GAGE1 | x | x | x | x | x | x | x |
| GD2 | x | x | x | x | x | x | x |
| GD3 | x | x | x | x | x | x | x |
| Glil | x | x | x | x | x | x | x |
| GP100 | x | x | x | x | x | x | x |
| GPA33 | x | x | x | x | x | x | x |
| Glypican-3 | x | x | x | x | x | x | x |
| HIV gp120 | x | x | x | x | x | x | x |
| HLA-A | x | x | x | x | x | x | x |
| HLA-A2 | x | x | x | x | x | x | x |
| HLA-AI | x | x | x | x | x | x | x |
| HLA-B | x | x | x | x | x | x | x |
| HLA-C | x | x | x | x | x | x | x |
| HMW-MAA | x | x | x | x | x | x | x |
| Her2/Neu | x | x | x | x | x | x | x |
| Her3 | x | x | x | x | x | x | x |
| u70/80 | x | x | x | x | x | x | x |
| LICAM | x | x | x | x | x | x | x |
| ULBP1 | x | x | x | x | x | x | x |
| ULBP2 | x | x | x | x | x | x | x |
| ULBP3 | x | x | x | x | x | x | x |
| ULBP6 | x | x | x | x | x | x | x |
| MICA | x | x | x | x | x | x | x |
| MICB | x | x | x | x | x | x | x |
| Her3 | x | x | x | x | x | x | x |
| EGF | x | x | x | x | x | x | x |
| SIRP1α | x | x | x | x | x | x | x |
| Lewis-Y | x | x | x | x | x | x | x |
| LIV-1 | x | x | x | x | x | x | x |
| (SLC39A6) | | | | | | | |
| Livin | x | x | x | x | x | x | x |
| LAMP1 | x | x | x | x | x | x | x |
| MAGEA3 | x | x | x | x | x | x | x |
| MAGEA4 | x | x | x | x | x | x | x |
| MAGEB6 | x | x | x | x | x | x | x |
| MAGEA1 | x | x | x | x | x | x | x |
| MART-1 | x | x | x | x | x | x | x |
| MCSP | x | x | x | x | x | x | x |
| MME | x | x | x | x | x | x | x |
| mesothelin | x | x | x | x | x | x | x |
| (MSLN) | | | | | | | |
| MAPK1 | x | x | x | x | x | x | x |
| MUC16 | x | x | x | x | x | x | x |
| MUC1 | x | x | x | x | x | x | x |
| MRP-3 | x | x | x | x | x | x | x |
| MyoD-1 | x | x | x | x | x | x | x |
| NCAM | x | x | x | x | x | x | x |
| nectin 4 | x | x | x | x | x | x | x |
| Nestin | x | x | x | x | x | x | x |
| NEP | x | x | x | x | x | x | x |
| NY-ESO-1 | x | x | x | x | x | x | x |
| hHLA-A | x | x | x | x | x | x | x |
| H60 | x | x | x | x | x | x | x |
| OLIG2 | x | x | x | x | x | x | x |
| 5T4 | x | x | x | x | x | x | x |
| p53 | x | x | x | x | x | x | x |
| P-Cadherin | x | x | x | x | x | x | x |
| PB | x | x | x | x | x | x | x |
| P- | x | x | x | x | x | x | x |
| glycoprotein | | | | | | | |
| PMCT | x | x | x | x | x | x | x |
| (SLC13A5) | | | | | | | |
| PRAME | x | x | x | x | x | x | x |
| PROX1 | x | x | x | x | x | x | x |
| PSA | x | x | x | x | x | x | x |
| PSCA | x | x | x | x | x | x | x |
| PSMA | x | x | x | x | x | x | x |
| PSC1 | x | x | x | x | x | x | x |
| PVRL4 | x | x | x | x | x | x | x |
| Ras | x | x | x | x | x | x | x |
| ROR1 | x | x | x | x | x | x | x |
| SART2 | x | x | x | x | x | x | x |
| SART3 | x | x | x | x | x | x | x |
| oncofetal | x | x | x | x | x | x | x |
| variants of | x | x | x | x | x | x | x |
| fibronectin | | | | | | | |
| tenascin | | | | | | | |
| LICAM | x | x | x | x | x | x | x |
| Rae-1α | x | x | x | x | x | x | x |
| Rae-1β | x | x | x | x | x | x | x |
| Rae-1δ | x | x | x | x | x | x | x |
| Rae-1γ | x | x | x | x | x | x | x |
| PDGF | x | x | x | x | x | x | x |
| Fas | x | x | x | x | x | x | x |
| SOX2 | x | x | x | x | x | x | x |
| STEAP1 | x | x | x | x | x | x | x |
| SLITRK6 | x | x | x | x | x | x | x |
| NaPi2a | x | x | x | x | x | x | x |
| SOX1 | x | x | x | x | x | x | x |
| SOX11 | x | x | x | x | x | x | x |
| SPANXA1 | x | x | x | x | x | x | x |
| SART-1 | x | x | x | x | x | x | x |
| SSX4 | x | x | x | x | x | x | x |
| SSX5 | x | x | x | x | x | x | x |
| Survivin | x | x | x | x | x | x | x |
| SSX2 | x | x | x | x | x | x | x |
| TAG72 | x | x | x | x | x | x | x |
| TEM1 | x | x | x | x | x | x | x |
| TEM8 | x | x | x | x | x | x | x |
| TSGA10 | x | x | x | x | x | x | x |
| TSSK6 | x | x | x | x | x | x | x |
| thyroglobulin | x | x | x | x | x | x | x |
| transferrin | x | x | x | x | x | x | x |
| receptor | | | | | | | |
| TACSTD2 | x | x | x | x | x | x | x |
| (TROP2) | | | | | | | |
| TMEM97 | x | x | x | x | x | x | x |
| TRP-2 | x | x | x | x | x | x | x |
| TULP2 | x | x | x | x | x | x | x |
| TROP2 | x | x | x | x | x | x | x |
| tyrosinase | x | x | x | x | x | x | x |
| TRP1 | x | x | x | x | x | x | x |
| UPAR | x | x | x | x | x | x | x |
| VEGF | x | x | x | x | x | x | x |
| VEGF | x | x | x | x | x | x | x |
| receptors | | | | | | | |
| VEGRR2 | x | x | x | x | x | x | x |
| BRAF | x | x | x | x | x | x | x |
| WT-1 | x | x | x | x | x | x | x |
| XAGE2 | x | x | x | x | x | x | x |
| ZNF165 | x | x | x | x | x | x | x |
| αvβ6 integrin | x | x | x | x | x | x | x |
| β-catenin | x | x | x | x | x | x | x |
| cathepsin B | x | x | x | x | x | x | x |
| CSAG2 | x | x | x | x | x | x | x |
| CTAG | x | x | x | x | x | x | x |
| EGFR | x | x | x | x | x | x | x |
| EGP40 | x | x | x | x | x | x | x |
| EZH2 | x | x | x | x | x | x | x |
| HIV sp120 | x | x | x | x | x | x | x |
| kappa light | x | x | x | x | x | x | x |
| chain | | | | | | | |
| LDHC | x | x | x | x | x | x | x |
| TRP-1 | x | x | x | x | x | x | x |
| Fas-L | x | x | x | x | x | x | x |
| DLL3 | x | x | x | x | x | x | x |
| MAGEA12 | x | x | x | x | x | x | x |
| MAGEC2 | x | x | x | x | x | x | x |
| BAGE | x | x | x | x | x | x | x |
| BAGE1 | x | x | x | x | x | x | x |
| GAGE | x | x | x | x | x | x | x |
| XAGE | x | x | x | x | x | x | x |
| XAGE1B | x | x | x | x | x | x | x |
| SSX | x | x | x | x | x | x | x |
| SSX2 | x | x | x | x | x | x | x |
| KKLC1 | x | x | x | x | x | x | x |
| SAGE | x | x | x | x | x | x | x |
| SPA17 | x | x | x | x | x | x | x |
| Cyclin A | x | x | x | x | x | x | x |
| KMHN1 | x | x | x | x | x | x | x |

[0157] In some embodiments, the payload molecule is an antigen. In some embodiments, the antigen is a protein selected from those listed in Table 4 or a portion thereof. In some embodiments, the antigen is a tumor-associated antigen (TAA) or a portion thereof. In some embodiments, the tumor-associated antigen is expressed on the cell surface of tumor cells. In some embodiments, expression of the antigen or a portion thereof induces immune responses against tumor cells. In some embodiments, the tumor-associated antigen is selected from CD19, EpCAM, CEA, PSMA, CD33, EGFR, Her2, EphA2, MCSP, ADAM17, PSCA, 17-A1, an NKGD2 ligand, CSF1R, FAP, GD2, DLL3, neuropilin, Survivin, or a MAGE family protein. In some embodiments, the tumor-associated antigen is Survivin. In some embodiments, the tumor-associated antigen is a MAGE (Melanoma Antigen Gene) family protein. The MAGE family protein comprises MAGE-B1, MAGEA1, MAGEA10, MAGEA11, MAGEA12, MAGEA2B, MAGEA3, MAGEA4, MAGEA6, MAGEA8, MAGEA9, MAGEB1, MAGEB10, MAGEB16, MAGEB18, MAGEB2, MAGEB3, MAGEB4, MAGEB5, MAGEB6, MAGEB6B, MAGEC1, MAGEC2, MAGEC3, MAGED1, MAGED2, MAGED4, MAGEE1, MAGEE2, MAGEF1, MAGEH1, MAGEL2, NDN, NDNL2, or any combination thereof. In some embodiments, the tumor associated antigen is selected from the antigens in Table 6 below. In some embodiments, the replicon encodes two, three, four, five or more tumor associated antigens of the disclosure.

[0158] In some embodiments, the payload molecule comprises or consists of a fragment (i.e., peptide fragment) of a tumor-associated antigen (TAA) of the disclosure. In some embodiments, the fragment of the TAA has a length of about 10 amino acids (aa), about 15 aa, about 20 aa, about 30 aa, about 40 aa, about 50 aa, about 60 aa, about 70 aa, about 80 aa, about 90 aa, about 100 aa, or any values in between. In some embodiments, the fragment of the TAA has a length of at least 10 aa, at least 15 aa, at least 20 aa, at least 30 aa, at least 40 aa, at least 50 aa, at least 60 aa, at least 70 aa, at least 80 aa, at least 90 aa, or at least 100 aa. In some embodiments, the replicon comprises two, three, four, five or more payload molecules each comprising or consisting of a fragment of different TAAs. In some embodiments, the replicon comprises two, three, four, five or more payload molecules each comprising or consisting of different fragments of the same TAA. In some embodiments, the replicon comprises two, three, four, five or more copies of the payload molecules each comprising or consisting of the same fragment of the same TAA. In some embodiments, the payload molecule comprises repeats of the same peptide fragment of the TAA, such as 2, 3, 4, 5, 6, 7, 8, 9, 10, or more than 10 repeats of the same peptide fragment.

TABLE 6
Tumor-Associated Antigen
Tumor-Associated Antigen
MAGEA1
MAGEA3
MAGEA4
MAGEA12
MAGEC2
BAGE (B melanoma antigen)
BAGE1 (B melanoma antigen 1)
GAGE (G antigen)
GAGE1 (G antigen 1)
XAGE (X antigen)
XAGE1B (X antigen family member 1B)
CTAG (cancer/testis antigen)
CTAG2 (LAGE1)
CTAGI (NY-ESO-1)
SSX (synovial sarcoma X)
SSX2 (synovial sarcoma X breakpoint 2)
KKLC1 (Kita-kyushu lung cancer antigen 1)
SAGE (sarcoma antigen)
SPA17 (sperm autoantigenic protein 17)
Cyclin A
KMHN1 (CCDC110)
Survivin
EBV-Encoded Latent Membrane Protein 1 (LMP1)
EBV-Encoded Latent Membrane Protein 2 (LMP2)
Viral antigen derived from Human papillomavirus (HPV)
Viral antigen derived from Human papillomavirus (HPV) strain 6
Viral antigen derived from Human papillomavirus (HPV) strain 7
Viral antigen derived from Human papillomavirus (HPV) strain 11
Viral antigen derived from Human papillomavirus (HPV) strain 16
Viral antigen derived from Human papillomavirus (HPV) strain 18
Viral antigen derived from Human papillomavirus (HPV) strain 31
Viral antigen derived from Epstein-Barr virus (EBV)
Viral antigen derived from Viral antigen from Human T-lymphotrophic virus
(HTLV)
Viral antigen derived from Merkel cell polyomavirus (MCV)
Viral antigen derived from Kaposi′s sarcoma-associated herpesvirus
Viral antigen derived from Cytomegalovirus (CMV)

[0159] In some embodiments, the payload molecule comprises or consist of a tumor neoantigen. The term “tumor neoantigen” refers to a neoantigen present in a subject's tumor cell or tissue but not in the subject's corresponding normal cell or tissue. Tumor neoantigen may be a peptide or a protein. In some embodiments, the tumor neoantigen is patient-specific or subject-specific. In some embodiments, the replicon encodes multiple payload molecules comprising a tumor neoantigen, such as 2, 3, 4, 5, 6, 7, 8, 9, 10, or more than 10 payload molecules comprising a tumor neoantigen. In some embodiments, the replicon may encode multiple copies of the same tumor neoantigen.

[0160] In some embodiments, the payload molecule is a bipartite polypeptide with specific binding to a major histocompatibility complex (MHC)-peptide antigen complex. In some embodiments, the bipartite polypeptide binds specifically to the MHC-peptide antigen complex. In some embodiments, the MHC is a class I MHC. In some embodiments, the peptide antigen is derived from TAA or tumor neoantigen. In some embodiments, the bipartite polypeptide comprises a fragment of a T-cell receptor (TCR) (e.g. the extracellular domain of TCR) that specifically binds to the MHC-peptide antigen complex. In some embodiments, the bipartite polypeptide also binds to one of the effector cell antigens according to Table 3. In some embodiments, the bipartite polypeptide specifically binds to CD3. In some embodiments, the bipartite polypeptide specifically binds to CD3R.

[0161] In some embodiments, the recombinant RNA replicon comprises one or more payload molecules, wherein the payload molecules comprise:
[0162] a) one or more cytokines comprising IFNγ, GM-CSF, IL-2, IL-12, IL-15, IL-18, IL-23, and IL-36γ;
[0163] b) one or more chemokines comprising CXCL10, CCL4, CCL5 and CCL21;
[0164] c) one or more antibodies comprising an anti-PD1-VHH-Fc antibody, an anti-CD47-VHH-Fc antibody, and an anti-TGFβ-VHH(or scFv)-Fc antibody;
[0165] d) one or more bipartite polypeptides comprising a bipartite polypeptide binding to DLL3 and an effector cell target antigen, a bipartite polypeptide binding to FAP and an effector cell target antigen, and a bipartite polypeptide binding to EpCAM and an effector cell target antigen;
[0166] e) one or more tumor-associated antigens comprising survivin, MAGE family proteins, and all antigens according to Table 6;
[0167] f) one or more tumor neoantigens;
[0168] g) one or more bipartite polypeptides binding to MHC-peptide antigen complex;
[0169] h) one or more fusogenic proteins comprising herpes simplex virus (HSV) UL27/glycoprotein B/gB, HSV UL53/glycoprotein K/gK, Respiratory syncytial virus (RSV) F protein, FASTp15, VSV-G, syncitin-1 (from human endogenous retrovirus-W (HERV-W)) or syncitin-2 (from HERVFRDE1), paramyxovirus SV5-F, measles virus-H, measles virus-F, and the glycoprotein from a retrovirus or lentivirus, such as gibbon ape leukemia virus (GALV), murine leukemia virus (MLV), Mason-Pfizer monkey virus (MPMV) and equine infectious anemia virus (EIAV), optionally with the R transmembrane peptide removed (R-versions);
[0170] i) one or more other payload molecules comprising IL15R, PGDH, ADA, ADA2, HYAL1, HYAL2, CHIPS, MLKL (or its 4HB domain only), GSDMD (or its L192A mutant, or its amino acids 1-233 fragment, or its amino acids 1-233 fragment with L192A mutation), GSDME (or its amino acid 1-237 fragment), HMGB1 (or its Box B domain only), Melittin (e.g., alpha-Melittin), SMAC/Diablo (or its amino acid 56-239 fragment), Snake LAAO, Snake disintegrin, Leptin, FLT3L, TRAIL, Gasdermin D or a truncation thereof, and Gasdermin E or a truncation thereof;
[0171] j) one or more antigens from pathogens comprising Dengue virus, Chikungunya virus, Mycobacterium tuberculosis, Human immunodeficiency viruses, SARS-CoV-2, Coronavirus, Hepatitis B Virus, Togaviridae family virus, Flaviviridae family virus, Influenza A virus, Influenza B virus, and a veterinary virus; or
[0172] k) any combination thereof.

[0173] Fusogenic proteins are proteins that facilitate the fusion of cell to cell membranes. The payload molecule, or at least one of the payload molecules, encoded by the replicon of the disclosure may be a fusogenic protein comprising herpes simplex virus (HSV) UL27/glycoprotein B/gB, HSV UL53/glycoprotein K/gK, Respiratory syncytial virus (RSV) F protein, FASTp15, VSV-G, syncitin-1 (from human endogenous retrovirus-W (HERV-W)) or syncitin-2 (from HERVFRDE1), paramyxovirus SV5-F, measles virus-H, measles virus-F, and the glycoprotein from a retrovirus or lentivirus, such as gibbon ape leukemia virus (GALV), murine leukemia virus (MLV), Mason-Pfizer monkey virus (MPMV) and equine infectious anemia virus (EIAV), optionally with the R transmembrane peptide removed (R-versions).

[0174] In some embodiments, the payload molecule is GM-CSF. In some embodiments, the payload molecule is a GM-CSF polypeptide having at least 70%, at least 75%, at least 80%, at least 85%, at least 90%, at least 95%, at least 98%, at least 99%, or 100%, sequence identity to SEQ ID NO: 81.

[0175] In some embodiments, the payload molecule is IL-2. In some embodiments, the payload molecule is a IL-2 polypeptide having at least 70%, at least 75%, at least 80%, at least 85%, at least 90%, at least 95%, at least 98%, at least 99%, or 100%, sequence identity to SEQ ID NO: 82. In some embodiments, the payload molecule is a IL-2 polypeptide having at least 70%, at least 75%, at least 80%, at least 85%, at least 90%, at least 95%, at least 98%, at least 99%, or 100%, sequence identity to SEQ ID NO: 83.

[0176] In some embodiments, the payload molecule is IL-12 beta subunit. In some embodiments, the payload molecule is a IL-12 beta subunit polypeptide having at least 70%, at least 75%, at least 80%, at least 85%, at least 90%, at least 95%, at least 98%, at least 99%, or 100%, sequence identity to SEQ ID NO: 84. In some embodiments, the payload molecule is IL-12 alpha subunit. In some embodiments, the payload molecule is a IL-12 alpha subunit polypeptide having at least 70%, at least 75%, at least 80%, at least 85%, at least 90%, at least 95%, at least 98%, at least 99%, or 100%, sequence identity to SEQ ID NO: 85. In some embodiments, the payload molecule is IL-23 alpha subunit. In some embodiments, the payload molecule is a IL-23 alpha subunit polypeptide having at least 70%, at least 75%, at least 80%, at least 85%, at least 90%, at least 95%, at least 98%, at least 99%, or 100%, sequence identity to SEQ ID NO: 86.

[0177] In some embodiments, the payload molecule is IL-18. In some embodiments, the payload molecule is an IL-18 polypeptide having at least 70%, at least 75%, at least 80%, at least 85%, at least 90%, at least 95%, at least 98%, at least 99%, or 100%, sequence identity to SEQ ID NO: 87.

[0178] In some embodiments, the payload molecule is IL-36γ. In some embodiments, the payload molecule is a IL-36γ polypeptide having at least 70%, at least 75%, at least 80%, at least 85%, at least 90%, at least 95%, at least 98%, at least 99%, or 100%, sequence identity to SEQ ID NO: 88. In some embodiments, the payload molecule is an IL-36γ polypeptide having at least 70%, at least 75%, at least 80%, at least 85%, at least 90%, at least 95%, at least 98%, at least 99%, or 100%, sequence identity to SEQ ID NO: 89.

[0179] In some embodiments, the payload molecule is CXCL10. In some embodiments, the payload molecule is a CXCL10 polypeptide having at least 70%, at least 75%, at least 80%, at least 85%, at least 90%, at least 95%, at least 98%, at least 99%, or 100%, sequence identity to SEQ ID NO: 90. In some embodiments, the payload molecule is a CXCL10 polypeptide having at least 70%, at least 75%, at least 80%, at least 85%, at least 90%, at least 95%, at least 98%, at least 99%, or 100%, sequence identity to SEQ ID NO: 91.

[0180] In some embodiments, the payload molecule is CCL4. In some embodiments, the payload molecule is a CCL4 polypeptide having at least 70%, at least 75%, at least 80%, at least 85%, at least 90%, at least 95%, at least 98%, at least 99%, or 100%, sequence identity to SEQ ID NO: 92.

[0181] In some embodiments, the payload molecule is CCL5. In some embodiments, the payload molecule is a CCL5 polypeptide having at least 70%, at least 75%, at least 80%, at least 85%, at least 90%, at least 95%, at least 98%, at least 99%, or 100%, sequence identity to SEQ ID NO: 93.

[0182] In some embodiments, the payload molecule is CCL21. In some embodiments, the payload molecule is a CCL21 polypeptide having at least 70%, at least 75%, at least 80%, at least 85%, at least 90%, at least 95%, at least 98%, at least 99%, or 100%, sequence identity to SEQ ID NO: 94.

[0183] In some embodiments, the payload molecule is anti-PD1-VHH-Fc. In some embodiments, the payload molecule is an anti-PD1-VHH-Fc(hIgG4) polypeptide having at least 70%, at least 75%, at least 80%, at least 85%, at least 90%, at least 95%, at least 98%, at least 99%, or 100%, sequence identity to SEQ ID NO: 95.

[0184] In some embodiments, the payload molecule is an anti-DLL3 bipartite polypeptide. In some embodiments, the anti-DLL3 bipartite polypeptide is an anti-DLL3 Bi-specific T-cell engager (BiTE). In some embodiments, the anti-DLL3 bipartite polypeptide or anti-DLL3 Bi-specific T-cell engager (BiTE) comprises a first domain capable of binding a cell surface antigen of an effector cell and a second domain capable of binding to DLL3. In some embodiments, the first domain binds to CD3. In some embodiments, the second domain (binding to DLL3) is an scFv or a nanobody (VHH). In some embodiments, the DLL3 binding domain is selected from those described in International PCT Application No. PCT/US2021/030836, which is incorporated herein by reference in its entirety. In some embodiments, the DLL3 antigen comprise an amino acid sequence having at least 70%, at least 75%, at least 80%, at least 85%, at least 90%, at least 95%, at least 98%, at least 99%, or 100%, sequence identity to SEQ ID NO: 96.

[0185] In some embodiments, the payload molecule comprises an anti-FAP heavy chain variable region. In some embodiments, the payload molecule comprises an anti-FAP heavy chain variable region polypeptide having at least 70%, at least 75%, at least 80%, at least 85%, at least 90%, at least 95%, at least 98%, at least 99%, or 100%, sequence identity to SEQ ID NO: 97. In some embodiments, the payload molecule comprises an anti-FAP light chain variable region. In some embodiments, the payload molecule comprises an anti-FAP light chain variable region polypeptide having at least 70%, at least 75%, at least 80%, at least 85%, at least 90%, at least 95%, at least 98%, at least 99%, or 100%, sequence identity to SEQ ID NO: 98.

[0186] In some embodiments, the payload molecule comprises an anti-CD3 heavy chain variable region. In some embodiments, the payload molecule comprises an anti-CD3 heavy chain variable region polypeptide having at least 70%, at least 75%, at least 80%, at least 85%, at least 90%, at least 95%, at least 98%, at least 99%, or 100%, sequence identity to SEQ ID NO: 99. In some embodiments, the payload molecule comprises an anti-CD3 light chain variable region. In some embodiments, the payload molecule comprises an anti-CD3 light chain variable region polypeptide having at least 70%, at least 75%, at least 80%, at least 85%, at least 90%, at least 95%, at least 98%, at least 99%, or 100%, sequence identity to SEQ ID NO: 100.

[0187] In some embodiments, the payload molecule is blinatumomab. In some embodiments, the payload molecule is a blinatumomab-like polypeptide having at least 70%, at least 75%, at least 80%, at least 85%, at least 90%, at least 95%, at least 98%, at least 99%, or 100%, sequence identity to SEQ ID NO: 101.

[0188] In some embodiments, the payload molecule is MT 110. In some embodiments, the payload molecule is a MT110-like polypeptide having at least 70%, at least 75%, at least 80%, at least 85%, at least 90%, at least 95%, at least 98%, at least 99%, or 100%, sequence identity to SEQ ID NO: 102.

[0189] In some embodiments, the payload molecule is pasotuxizumab. In some embodiments, the payload molecule is a pasotuxizumab-like polypeptide having at least 70%, at least 75%, at least 80%, at least 85%, at least 90%, at least 95%, at least 98%, at least 99%, or 100%, sequence identity to SEQ ID NO: 103.

[0190] In some embodiments, the payload molecule is AMG330. In some embodiments, the payload molecule is an AMG330-like polypeptide having at least 70%, at least 75%, at least 80%, at least 85%, at least 90%, at least 95%, at least 98%, at least 99%, or 100%, sequence identity to SEQ ID NO: 104.

[0191] In some embodiments, the payload molecule is COVA420 heavy chain. In some embodiments, the payload molecule is a COVA420 heavy chain-like polypeptide having at least 70%, at least 75%, at least 80%, at least 85%, at least 90%, at least 95%, at least 98%, at least 99%, or 100%, sequence identity to SEQ ID NO: 105. In some embodiments, the payload molecule is COVA420 light chain. In some embodiments, the payload molecule is a COVA420 light chain-like polypeptide having at least 70%, at least 75%, at least 80%, at least 85%, at least 90%, at least 95%, at least 98%, at least 99%, or 100%, sequence identity to SEQ ID NO: 106.

[0192] In some embodiments, the payload molecule is survivin. In some embodiments, the payload molecule is a survivin polypeptide having at least 70%, at least 75%, at least 80%, at least 85%, at least 90%, at least 95%, at least 98%, at least 99%, or 100%, sequence identity to SEQ ID NO: 107.

[0193] In some embodiments, the payload molecule is IFNγ. In some embodiments, the payload molecule is an IFNγ polypeptide having at least 70%, at least 75%, at least 80%, at least 85%, at least 90%, at least 95%, at least 98%, at least 99%, or 100%, sequence identity to SEQ ID NO: 113.

[0194] In some embodiments, the payload molecule is IL-15. In some embodiments, the payload molecule is an IL-15 polypeptide having at least 70%, at least 75%, at least 80%, at least 85%, at least 90%, at least 95%, at least 98%, at least 99%, or 100%, sequence identity to SEQ ID NO: 114.

[0195] In some embodiments, the payload molecule is IL15R. In some embodiments, the IL15R comprises IL15RA and/or IL15RB. In some embodiments, the IL15RA has at least 70%, at least 75%, at least 80%, at least 85%, at least 90%, at least 95%, at least 98%, at least 99%, or 100%, sequence identity to SEQ ID NO: 115. In some embodiments, the IL15RB polypeptide has at least 70%, at least 75%, at least 80%, at least 85%, at least 90%, at least 95%, at least 98%, at least 99%, or 100%, sequence identity to SEQ ID NO: 116.

[0196] In some embodiments, the payload molecule is PGDH. In some embodiments, the payload molecule is a PGDH polypeptide having at least 70%, at least 75%, at least 80%, at least 85%, at least 90%, at least 95%, at least 98%, at least 99%, or 100%, sequence identity to SEQ ID NO: 117.

[0197] In some embodiments, the payload molecule is ADA2. In some embodiments, the payload molecule is an ADA2 polypeptide having at least 70%, at least 75%, at least 80%, at least 85%, at least 90%, at least 95%, at least 98%, at least 99%, or 100%, sequence identity to SEQ ID NO: 118.

[0198] In some embodiments, the payload molecule is HYAL1. In some embodiments, the payload molecule is an HYAL 1 polypeptide having at least 70%, at least 75%, at least 80%, at least 85%, at least 90%, at least 95%, at least 98%, at least 99%, or 100%, sequence identity to SEQ ID NO: 119.

[0199] In some embodiments, the payload molecule is HYAL2. In some embodiments, the payload molecule is an HYAL2 polypeptide having at least 70%, at least 75%, at least 80%, at least 85%, at least 90%, at least 95%, at least 98%, at least 99%, or 100%, sequence identity to SEQ ID NO: 120.

[0200] In some embodiments, the payload molecule is MLKL. In some embodiments, the payload molecule is an MLKL polypeptide having at least 70%, at least 75%, at least 80%, at least 85%, at least 90%, at least 95%, at least 98%, at least 99%, or 100%, sequence identity to SEQ ID NO: 121. In some embodiments, the payload molecule comprises or consists of MLKL 41113 domain.

[0201] In some embodiments, the payload molecule is GSDMD. In some embodiments, the payload molecule is a GSDMD polypeptide having at least 70%, at least 75%, at least 80%, at least 85%, at least 90%, at least 95%, at least 98%, at least 99%, or 100%, sequence identity to SEQ ID NO: 122. In some embodiments, the payload molecule is a GSDMD 1-233 fragment and/or L192A mutant.

[0202] In some embodiments, the payload molecule is GSDME. In some embodiments, the payload molecule is a GSDME polypeptide having at least 70%, at least 75%, at least 80%, at least 85%, at least 90%, at least 95%, at least 98%, at least 99%, or 100%, sequence identity to SEQ ID NO: 123. In some embodiments, the payload molecule is a GSDME 1-237 fragment.

[0203] In some embodiments, the payload molecule is HMGB1. In some embodiments, the payload molecule is an HMGB1 polypeptide having at least 70%, at least 75%, at least 80%, at least 85%, at least 90%, at least 95%, at least 98%, at least 99%, or 100%, sequence identity to SEQ ID NO: 124. In some embodiments, the payload molecule comprises or consists of HMGB1 Box B domain.

[0204] In some embodiments, the payload molecule is Melittin. In some embodiments, the payload molecule is a Melittin polypeptide having at least 70%, at least 75%, at least 80%, at least 85%, at least 90%, at least 95%, at least 98%, at least 99%, or 100%, sequence identity to SEQ ID NO: 125.

[0205] In some embodiments, the payload molecule is SMAC/Diablo. In some embodiments, the payload molecule is an SMAC/Diablo polypeptide having at least 70%, at least 75%, at least 80%, at least 85%, at least 90%, at least 95%, at least 98%, at least 99%, or 100%, sequence identity to SEQ ID NO: 126. In some embodiments, the payload molecule comprises or consists of SMAC/Diablo amino acid 56-239 fragment.

[0206] In some embodiments, the payload molecule is Snake LAAO. In some embodiments, the payload molecule is a Snake LAAO polypeptide having at least 70%, at least 75%, at least 80%, at least 85%, at least 90%, at least 95%, at least 98%, at least 99%, or 100%, sequence identity to SEQ ID NO: 127.

[0207] In some embodiments, the payload molecule is Leptin. In some embodiments, the payload molecule is a Leptin polypeptide having at least 70%, at least 75%, at least 80%, at least 85%, at least 90%, at least 95%, at least 98%, at least 99%, or 100%, sequence identity to SEQ ID NO: 128.

[0208] In some embodiments, the payload molecule is FLT3L. In some embodiments, the payload molecule is a FLT3L polypeptide having at least 70%, at least 75%, at least 80%, at least 85%, at least 90%, at least 95%, at least 98%, at least 99%, or 100%, sequence identity to SEQ ID NO: 129.

[0209] In some embodiments, the payload molecule is TRAIL. In some embodiments, the payload molecule is a TRAIL polypeptide having at least 70%, at least 75%, at least 80%, at least 85%, at least 90%, at least 95%, at least 98%, at least 99%, or 100%, sequence identity to SEQ ID NO: 130.

[0210] In some embodiments, the payload molecule is MAGEA1. In some embodiments, the payload molecule is an MAGEA1 polypeptide having at least 70%, at least 75%, at least 80%, at least 85%, at least 90%, at least 95%, at least 98%, at least 99%, or 100%, sequence identity to SEQ ID NO: 131.

[0211] In some embodiments, the payload molecule is MAGEA3. In some embodiments, the payload molecule is an MAGEA3 polypeptide having at least 70%, at least 75%, at least 80%, at least 85%, at least 90%, at least 95%, at least 98%, at least 99%, or 100%, sequence identity to SEQ ID NO: 132.

[0212] In some embodiments, the payload molecule is MAGEA4. In some embodiments, the payload molecule is an MAGEA4 polypeptide having at least 70%, at least 75%, at least 80%, at least 85%, at least 90%, at least 95%, at least 98%, at least 99%, or 100%, sequence identity to SEQ ID NO: 133.

[0213] In some embodiments, the payload molecule is MAGEA12. In some embodiments, the payload molecule is an MAGEA12 polypeptide having at least 70%, at least 75%, at least 80%, at least 85%, at least 90%, at least 95%, at least 98%, at least 99%, or 100%, sequence identity to SEQ ID NO: 134.

[0214] In some embodiments, the payload molecule is MAGEC2. In some embodiments, the payload molecule is an MAGEC2 polypeptide having at least 70%, at least 75%, at least 80%, at least 85%, at least 90%, at least 95%, at least 98%, at least 99%, or 100%, sequence identity to SEQ ID NO: 135.

[0215] In some embodiments, the payload molecule is BAGE1 (B melanoma antigen 1). In some embodiments, the payload molecule is an BAGE1 (B melanoma antigen 1) polypeptide having at least 70%, at least 75%, at least 80%, at least 85%, at least 90%, at least 95%, at least 98%, at least 99%, or 100%, sequence identity to SEQ ID NO: 136.

[0216] In some embodiments, the payload molecule is GAGE1 (G antigen 1). In some embodiments, the payload molecule is an GAGE1 (G antigen 1) polypeptide having at least 70%, at least 75%, at least 80%, at least 85%, at least 90%, at least 95%, at least 98%, at least 99%, or 100%, sequence identity to SEQ ID NO: 137.

[0217] In some embodiments, the payload molecule is XAGE1B (X antigen family member 1B). In some embodiments, the payload molecule is an XAGE1B (X antigen family member 1B) polypeptide having at least 70%, at least 75%, at least 80%, at least 85%, at least 90%, at least 95%, at least 98%, at least 99%, or 100%, sequence identity to SEQ ID NO: 138.

[0218] In some embodiments, the payload molecule is CTAG2 (LAGE1). In some embodiments, the payload molecule is a CTAG2 (LAGE1) polypeptide having at least 70%, at least 75%, at least 80%, at least 85%, at least 90%, at least 95%, at least 98%, at least 99%, or 100%, sequence identity to SEQ ID NO: 139.

[0219] In some embodiments, the payload molecule is CTAG1 (NY-ESO-1). In some embodiments, the payload molecule is a CTAG1 (NY-ESO-1) polypeptide having at least 70%, at least 75%, at least 80%, at least 85%, at least 90%, at least 95%, at least 98%, at least 99%, or 100%, sequence identity to SEQ ID NO: 140.

[0220] In some embodiments, the payload molecule is SSX2 (synovial sarcoma X breakpoint 2). In some embodiments, the payload molecule is an SSX2 (synovial sarcoma X breakpoint 2) polypeptide having at least 70%, at least 75%, at least 80%, at least 85%, at least 90%, at least 95%, at least 98%, at least 99%, or 100%, sequence identity to SEQ ID NO: 141.

[0221] In some embodiments, the payload molecule is KKLC1 (Kita-kyushu lung cancer antigen 1). In some embodiments, the payload molecule is a KKLC1 (Kita-kyushu lung cancer antigen 1) polypeptide having at least 70%, at least 75%, at least 80%, at least 85%, at least 90%, at least 95%, at least 98%, at least 99%, or 100%, sequence identity to SEQ ID NO: 142.

[0222] In some embodiments, the payload molecule is SAGE (sarcoma antigen). In some embodiments, the payload molecule is a SAGE (sarcoma antigen) polypeptide having at least 70%, at least 75%, at least 80%, at least 85%, at least 90%, at least 95%, at least 98%, at least 99%, or 100%, sequence identity to SEQ ID NO: 143.

[0223] In some embodiments, the payload molecule is SPA17 (sperm autoantigenic protein 17). In some embodiments, the payload molecule is a SPA17 (sperm autoantigenic protein 17) polypeptide having at least 70%, at least 75%, at least 80%, at least 85%, at least 90%, at least 95%, at least 98%, at least 99%, or 100%, sequence identity to SEQ ID NO: 144.

[0224] In some embodiments, the payload molecule is Cyclin A. In some embodiments, the payload molecule is a Cyclin A polypeptide having at least 70%, at least 75%, at least 80%, at least 85%, at least 90%, at least 95%, at least 98%, at least 99%, or 100%, sequence identity to SEQ ID NO: 145.

[0225] In some embodiments, the payload molecule is KMHN1 (CCDC110). In some embodiments, the payload molecule is a KMHN1 (CCDC110) polypeptide having at least 70%, at least 75%, at least 80%, at least 85%, at least 90%, at least 95%, at least 98%, at least 99%, or 100%, sequence identity to SEQ ID NO: 146.

[0226] In some embodiments, the payload molecule is LMP-1. In some embodiments, the payload molecule is a LMP-1 polypeptide having at least 70%, at least 75%, at least 80%, at least 85%, at least 90%, at least 95%, at least 98%, at least 99%, or 100%, sequence identity to SEQ ID NO: 147.

[0227] In some embodiments, the payload molecule is LMP-2. In some embodiments, the payload molecule is a LMP-2 polypeptide having at least 70%, at least 75%, at least 80%, at least 85%, at least 90%, at least 95%, at least 98%, at least 99%, or 100%, sequence identity to SEQ ID NO: 148.

[0228] In some embodiments, the payload molecule is an antigen that is not encoded by a subject's own genome. In some embodiments, the payload molecule is an antigen that is expressed by a pathogenic microorganism. Pathogenic microorganisms comprise bacteria, viruses, parasites and fungi. In some embodiments, the payload molecule is an antigen from one of the pathogens comprising Dengue virus, Chikungunya virus, Mycobacterium tuberculosis, Human immunodeficiency virus, SARS-CoV-2, Coronavirus, Hepatitis B virus, Togaviridae family virus, Flaviviridae family virus, Influenza A virus, Influenza B virus and a veterinary virus.

### Cleavage Polypeptides

[0229] In some embodiments, one or more cleavage polypeptides are operably linked to the payload molecule. The presence of such cleavage polypeptides allows separation of the payload molecule from the rest of the polypeptide encoded by the replicon. In some embodiments, the replicon comprises a heterologous polynucleotide encoding two or more payload molecules operably linked to one or more cleavage polypeptides, which allows separation of the payload molecules. In some embodiments, additional peptide linker (such as a Glycine-Serine linker) may be present between the payload molecule and the cleavage polypeptide.

[0230] The cleavage polypeptides comprise 2A family self-cleaving peptides, 3C cleavage site, furin site, IGSF1, and HIV-1 protease site. It shall be noted that more than one cleavage polypeptides can be operably linked to the payload molecule, and different cleavage polypeptides can be used in the same replicon. For example, different cleavage polypeptides can be operably linked to the N-terminus and C-terminus of a payload molecule. In addition, two or more cleavage polypeptides can be joined together or linked consecutively to form a longer cleavage polypeptide which may possess improved cleavage property.

[0231] In some embodiments, the cleavage polypeptide comprises or consists of a 2A family self-cleaving peptide. Self-cleaving peptides are found in members of the Picornaviridae virus family, including aphthoviruses such as foot-and-mouth disease virus (FMDV), equine rhinitis A virus (ERAV), Thosea asigna virus (TaV) and porcine teschovirus-1 (PTV-1) (Donnelly, M L, et al., J. Gen. Virol., 82, 1027-101 (2001); Ryan, M D, et al., J. Gen. Virol., 72, 2727-2732 (2001) and cardioviruses such as Theilovirus (e.g., Theiler's murine encephalomyelitis) and encephalomyocarditis viruses. The 2A peptides derived from FMDV, ERAV, PTV-1, and TaV are sometimes referred to herein as “F2A”, “E2A”, “P2A”, and “T2A”, respectively. Aphthovirus 2A polypeptides typically contain a Dx1Ex2NPG (SEQ ID NO: 63) motif, where xl is often valine or isoleucine. Without wishing to be bound by any particular theory, the 2A sequence is believed to mediate ‘ribosomal skipping’ between the proline and glycine, impairing normal peptide bond formation between the P and G without affecting downstream translation. Exemplary 2A self-cleaving peptides can be found in Table 7 below. Additional exemplary 2A self-cleaving peptides can be found in U.S. Pat. No. 9,497,943 and Souza-Moreira et al., FEMS Yeast Res. 2018 Aug. 1; 18(5), which are incorporated by reference herein. In some embodiments, the cleavage polypeptide comprises one of the 2A self-cleaving peptides according to Table 7. In some embodiments, the cleavage polypeptide comprises an amino acid sequence consisting of at most 1, at most 2, at most 3 or at most 4 mutations according to one of the 2A self-cleaving peptides in Table 7.

TABLE 7
Exemplary 2A self-cleaving peptides

| Name | Sequence | SEQ ID NO |
|---|---|---|
| T2A | EGRGSLLTCGDVEEN | 64 |
| | PGP | |
| P2A | ATNFSLLKQAGDVEE | 65 |
| | NPGP | |
| E2A | QCTNYALLKLAGDVE | 66 |
| | SNPGP | |
| F2A | VKQTLNFDLLKLAGD | 67 |
| | VESNPGP | |
| SVV 2A | SGDIETNPGP | 68 |

[0232] In some embodiments, the cleavage polypeptide comprises or consists of a SVV 2A self-cleaving peptide. In some embodiments, the SVV 2A self-cleaving peptide has the amino acid sequence of SGDIETNPGP (SEQ ID NO: 68). In some embodiments, the SVV 2A self-cleaving peptide has an amino acid sequence consisting of at most 1, at most 2, or at most 3 mutations according to SGDIETNPGP (SEQ ID NO: 68).

[0233] In some embodiments, the cleavage polypeptide comprises or consists of a Coxsackievirus 2A cleavage site. In some embodiments, the Coxsackievirus 2A cleavage site has the amino acid sequence of GFGHQ (SEQ ID NO: 69). In some embodiments, the Coxsackievirus 2A cleavage site has an amino acid sequence consisting of at most 1, at most 2, or at most 3 mutations according to GFGHQ (SEQ ID NO: 69).

[0234] In some embodiments, the cleavage polypeptide comprises or consists of 3C cleavage sites. In some embodiments, the 3C cleavage site is a SVV 3C cleavage site having amino acid sequence IVYELQGP (SEQ ID NO: 70). In some embodiments, the 3C cleavage site has an amino acid sequence consisting of at most 1, at most 2, or at most 3 mutations according to IVYELQGP (SEQ ID NO: 70). In some embodiments, the cleavage polypeptide comprises a fusin site and a 3C cleavage site. In some embodiments, the cleavage polypeptide comprises or consists of an amino acid sequence of RRKRIVYELQGP (SEQ ID NO: 71). In some embodiments, the 3C cleavage site has an amino acid sequence consisting of at most 1, at most 2, at most 3 or at most 4 mutations according to RRKRIVYELQGP (SEQ ID NO: 71).

[0235] In some embodiments, the cleavage polypeptide comprises or consists of one or more cleavage sites that can be cleaved by a protease produced by a mammalian cell. In some embodiments, the protease is a furin protease. In some embodiments, the cleavage polypeptide comprises or consists of one furin site. In some embodiments, the cleavage polypeptide comprises or consists of two or more furin sites. In some embodiments, the furin site has a consensus sequence of Arg-X-X-Arg (SEQ ID NO: 72). In some embodiments, the furin site has a consensus sequence of Arg-X-Lys/Arg-Arg (SEQ ID NO: 73). In some embodiments, the furin site has the amino acid sequence of RRKR (SEQ ID NO: 74). In some embodiments, the cleavage polypeptide comprises one or more GS linker (amino acid sequence Gly-Ser). In some embodiments, the cleavage polypeptide comprises one or more GSG linkers (amino acid sequence Gly-Ser-Gly). In some embodiments, the cleavage polypeptide adopts the configuration of “GSG linker-2A peptide”. In some embodiments, the cleavage polypeptide adopts the configuration of “furin site-2A peptide”. In some embodiments, the cleavage polypeptide adopts the configuration of “furin site-GSG linker-2A peptide”.

[0236] In some embodiments, the cleavage polypeptide comprises, or consists of, an IGSF1 polypeptide. In some embodiments, the IGSF1 polypeptide comprises or consists of the amino acid sequence of NEAIRLSLIMQLVALLLVVLWIRWKCRRLRIREAWLLGTAQGVTMLFIVTALLCCGLCNG (SEQ ID NO: 75). In some embodiments, the IGSF1 polypeptide comprises or consists of an amino acid sequence having at least 70%, at least 75%, at least 80%, at least 85%, at least 90%, at least 95%, or at least 98% identity to SEQ ID NO: 75. In some embodiments, the cleavage polypeptide comprises one or more furin sites in addition to the IGSF1 polypeptide. In some embodiments, the cleavage polypeptide comprises, or consists of, a furin-site containing peptide having an amino acid sequence of GSRRKRGSRRKRGS (SEQ ID NO: 76). In some embodiments, the cleavage polypeptide comprises, or consists of, the amino acid sequence of GSRRKRGSRRKRGSNEAIRLSLIMQLVALLLVVLWIRWKCRRLRIREAWLLGTAQGVTMLFI VTALLCCGLCNG (SEQ ID NO: 77). In some embodiments, the cleavage polypeptide comprises, or consist of, an amino acid sequence having at least 70%, at least 75%, at least 80%, at least 85%, at least 90%, at least 95%, or at least 98% identity to SEQ ID NO: 77. In some embodiments, two of the payload molecules are operably linked to a cleavage polypeptide comprising an IGSF polypeptide. In some embodiments, two of the payload molecules are operably linked to a cleavage polypeptide comprising an IGSF polypeptide and one or more furin sites. In some embodiments, two of the payload molecules are operably linked to a cleavage polypeptide comprising or consisting of the amino acid sequence of SEQ ID NO: 77.

[0237] In some embodiments, the cleavage polypeptide comprises or consists of one or more cleavage site that can be recognized by a non-mammalian protease. In some embodiments, the non-mammalian protease is an HIV protease. In some embodiments, the cleavage polypeptide comprises, or consists of, an HIV protease site. In some embodiments, the HIV protease site comprises or consists of a PR cleavage sequence having the amino acid sequence of IFLETS (SEQ ID NO: 78). In some embodiments, the HIV protease site comprises or consists of a PR cleavage sequence having at most one, at most two, or at most three mutations or conservative mutations according to IFLETS (SEQ ID NO: 78). In some embodiments, the cleavage polypeptide comprises a GS linker and a PR cleavage sequence. In some embodiments, the cleavage polypeptide comprises, or consists of, an amino acid sequence of GSGIFLETS (SEQ ID NO: 79). In some embodiments, the cleavage polypeptide comprises, or consists of, an amino acid sequence having at most one, at most two, at most three or at most four mutations or conservative mutations according to GSGIFLETS (SEQ ID NO: 79).

[0238] In some embodiments, the heterologous nucleic acid comprises an HIV protease coding sequence. In some embodiments, the HIV protease comprises or consists of an amino acid sequence having at least 70%, at least 75%, at least 80%, at least 85%, at least 90%, at least 95%, at least 98% identity, at least 99% identity or 100% identity to SEQ ID NO: 80:

(SEQ ID NO: 80)
QITLWQRPLVTIKIGGQLKEALLDTGADDTV
LEEMSLPGRWKPKMIGGIGGFIKVRQYDQIL
IEICGHKAIGTVLVGPTPVNIIGRNLLTQIG
CTLNF

[0239] In some embodiments, the heterologous polynucleotide comprises a coding region that encodes a payload molecule operably linked to one or more cleavage polypeptides. In some embodiments, the payload molecule is operably linked to two cleavage polypeptides. In some embodiments, at least one cleavage polypeptide flanks the N-terminus of the payload molecule and/or at least one cleavage polypeptide flanks the C-terminus of the payload molecule. In some embodiments, the cleavage peptides and the payload molecule adopt the configuration of:

N′-cleavage polypeptide 1-payload molecule-cleavage polypeptide 2-C′.

[0240] In some embodiments, additional cleavage polypeptide may be present at the N′ and/or C′ terminus of the configuration described above in this paragraph. In some embodiments, the additional cleavage polypeptide comprises a 2A self-cleaving peptide. In some embodiments, the cleavage polypeptide 2 at the C-terminus comprises or consists of a T2A self-cleaving peptide. In some embodiments, the cleavage polypeptide 1 at the N-terminus comprises or consists of a 2A self-cleaving peptide. In some embodiments, additional peptide linker (such as a Glycine-Serine linker) may be present between the payload molecule and the cleavage polypeptide.

### Co-Expression of Multiple Payload Molecules

[0241] In some embodiments, the disclosure provides recombinant RNA replicons comprising heterologous nucleotides encoding two or more payload molecules. In some embodiments, the recombinant RNA replicon of the present disclosure enables expression of two or more payload molecules from one replicon.

[0242] In some embodiments, the two or more payload molecules are encoded by a continuous heterologous polynucleotide. In some embodiments, at least one of the payload molecules is encoded by a second heterologous polynucleotide. In some embodiments, the two or more heterologous polynucleotide are inserted into different locations of the viral genome.

[0243] In some embodiments, at least one of the payload molecules is a secreted protein. In some embodiments, the secreted protein comprises a native signal peptide or a non-native signal peptide. In some embodiments, two of the payload molecules are secreted proteins. In some embodiments, at least two of the payload molecules are secreted proteins. In some embodiments, all of the payload molecules are secreted proteins. In some embodiments, at least one of the payload molecules is a secreted protein comprising a native signal peptide sequence for secretion. In some embodiments, at least one of the payload molecules is a secreted protein comprising a non-native signal peptide sequence for secretion. In some embodiments, at least one of the payload molecules is a secreted protein without signal peptide sequence.

[0244] In some embodiments, each of the payload molecule is operably linked to a cleavage polypeptide at its C-terminus. In some embodiments, each of the payload molecule is operably linked to cleavage polypeptides at both its N-terminus and its C-terminus.

[0245] In some embodiments, the heterologous polynucleotide comprises a coding region that encodes two or more payload molecules operably linked to a cleavage polypeptide. In some embodiments, the two or more payload molecules and the cleavage polypeptide adopts the configuration of:

N′-payload molecule 1-cleavage polypeptide-payload molecule 2-C′.

[0246] In some embodiments, additional cleavage polypeptide may be present at the N′ and/or C′ terminus of the configuration described above in this paragraph. In some embodiments, the additional cleavage polypeptide comprises a 2A self-cleaving peptide. In some embodiments, a T2A self-cleaving peptide flanks the C-terminus of payload molecule 2. In some embodiments, additional peptide linker (such as a Glycine-Serine linker) may be present between the payload molecule and the cleavage polypeptide.

[0247] In some embodiments, the heterologous polynucleotide comprises a coding region that encodes two payload molecules operably linked to a cleavage polypeptide comprising or consisting of an IGSF polypeptide. In some embodiments, the IGSF1 polypeptide has the amino acid sequence of:

(SEQ ID NO: 75)
NEAIRLSLIMQLVALLLVVLWIRWKCRRLR
IREAWLLGTAQGVTMLFIVTALLCCGLCNG.

In some embodiments, the IGSF1 polypeptide has at least 70%, at least 75%, at least 80%, at least 85%, at least 90%, at least 95%, or at least 98% identity to SEQ ID NO: 75. In some embodiments, the cleavage polypeptide comprises a furin-site containing peptide having an amino acid sequence of GSRRKRGSRRKRGS (SEQ ID NO: 76). In some embodiments, the cleavage polypeptide comprises, or consists of, an amino acid sequence of:

(SEQ ID NO: 77)
GSRRKRGSRRKRGSNEAIRLSLIMQLVALLLVVLWIR
WKCRRLRIREAWLLGTAQGVTMLFIVTALLCCGLCNG.

In some embodiments, the cleavage polypeptide comprises, or consist of, an amino acid sequence having at least 70%, at least 75%, at least 80%, at least 85%, at least 90%, at least 95%, or at least 98% identity to SEQ ID NO: 77.

[0248] In some embodiments, the heterologous polynucleotide comprises a coding region that encodes two payload molecules operably linked to a cleavage polypeptide comprising or consisting of one or more HIV protease site. In some embodiments, the HIV protease site comprises or consists of a PR cleavage sequence having the amino acid sequence of IFLETS (SEQ ID NO: 78), or an amino acid sequence having at most one, at most two, or at most three mutations or conservative mutations according to IFLETS (SEQ ID NO: 78). In some embodiments, the cleavage polypeptide comprises a GS linker and a PR cleavage sequence. In some embodiments, the cleavage polypeptide comprises, or consists of, an amino acid sequence of GSGIFLETS (SEQ ID NO: 79). In some embodiments, the cleavage polypeptide comprises, or consists of, an amino acid sequence having at most one, at most two, at most three or at most four mutations or conservative mutations according to GSGIFLETS (SEQ ID NO: 79).

[0249] In some embodiments, the heterologous nucleic acid further comprises an HIV protease coding region. In some embodiments, the HIV protease is operably linked to the one or more payload molecule by a cleavage polypeptide comprising or consisting of an HIV protease sites. In some embodiments, the HIV protease is located in between two payload molecule.

[0250] In some embodiments, the heterologous nucleic acid comprises a coding region that encodes two payload molecules and the HIV protease. In some embodiments, the heterologous nucleic acid comprises a coding region that encodes a polypeptide adopting the configuration of:

N′-Payload molecule 1-HIV protease site-HIV protease-HIV protease site-Payload molecule 2-C′.

[0251] In some embodiments, additional cleavage polypeptide maybe present at the N′ and/or C′ terminus of the configuration described above in this paragraph. In some embodiments, the additional cleavage polypeptide comprises an HIV protease site. In some embodiments, the additional cleavage polypeptide comprises a 2A self-cleaving peptide. In some embodiments, a T2A self-cleaving peptide flanks the C-terminus of payload molecule 2. In some embodiments, additional peptide linker (such as a Glycine-Serine linker) may be present between the payload molecule and the HIV protease site.

[0252] In some embodiments, the heterologous nucleic acid comprises a coding region that encodes three payload molecules and the HIV protease. In some embodiments, the heterologous nucleic acid comprises a coding region that encodes a polypeptide adopting the configuration of:

N′-Payload molecule 1-HIV protease site-HIV protease-HIV protease site-Payload molecule 2-HIV protease site-Payload molecule 3-C′.

[0253] In some embodiments, additional cleavage polypeptides maybe present at the N′ and/or C′ terminus of the configuration described above in this paragraph. In some embodiments, the additional cleavage polypeptide comprises an HIV protease site. In some embodiments, the additional cleavage polypeptide comprises a 2A self-cleaving peptide. In some embodiments, a T2A self-cleaving peptide flanks the C-terminus of payload molecule 3. In some embodiments, additional peptide linker (such as a Glycine-Serine linker) may be present between the payload molecule and the HIV protease site.

[0254] In some embodiments, the two or more payload molecules are selected from the group consisting of a fluorescent protein, an enzyme, a cytokine, a chemokine, an antigen-binding molecule capable of binding to a cell surface receptor, and a ligand for a cell-surface receptor. In some embodiments, at least one of the payload molecules is a secreted protein. In some embodiments, the two or more payload molecules are secreted proteins. In some embodiments, the payload molecules are selected from the payload molecules described in the “Heterologous Polynucleotide and Payload Molecules” section of the present disclosure.

[0255] In some embodiments, the two or more payload molecules comprise:
[0256] a. IL-2 and IL-36γ;
[0257] b. CXCL10 and an antigen binding molecule binding to FAP and CD3;
[0258] c. IL-2 and an antigen binding molecule binding to DLL3 and CD3;
[0259] d. IL-36γ and an antigen binding molecule binding to DLL3 and CD3; or e. IL-2, IL-36γ and an antigen binding molecule binding to DLL3 and CD3

[0260] In some embodiments, the two or more payload molecules comprise anti-DLL3 bipartite polypeptide, anti-FAP bipartite polypeptide, anti-PD1-VHH-Fc antibody, IL-2, IL-12, IL-18, L-23, IL-36γ, CCL21, CXCL10, or any combinations thereof. In some embodiments, the anti-DLL3 bipartite polypeptide is an anti-DLL3/anti-CD3 bipartite polypeptide. In some embodiments, the anti-FAP bipartite polypeptide is an anti-FAP/anti-CD3 bipartite polypeptide.

[0261] In some embodiments, the replicon of the disclosure, or the heterologous polynucleotide of the replicon, comprises coding region for two, or at least two payload molecules according to one of the payload molecule combinations listed in Table 8 below. In some embodiments, the replicon is a SVV derived replicon. In some embodiments, the replicon is a CVA21 derived replicon. Each combination of two payload molecules is marked as “x” according to Table 8 below. Those “x” marked combinations in Table 8 that have the same payload molecules indicate that the replicon comprises two copies of the payload molecule.

TABLE 8
Two Payload Molecule Combinations

| | | GM- | | | | | | | | | |
|---|---|---|---|---|---|---|---|---|---|---|---|
| | IFNg | CSF | IL-2 | IL-12 | IL-15 | IL-18 | IL-23 | IL-36γ | CXCL10 | CCL4 | CCL5 |
| IFNg | X | X | X | X | X | X | X | X | X | X | X |
| GM-CSF | X | X | X | X | X | X | X | X | X | X | X |
| IL-2 | X | X | X | X | X | X | X | X | X | X | X |
| IL-12 | X | X | X | X | X | X | X | X | X | X | X |
| IL-15 | X | X | X | X | X | X | X | X | X | X | X |
| IL-18 | X | X | X | X | X | X | X | X | X | X | X |
| IL-23 | X | X | X | X | X | X | X | X | X | X | X |
| IL-36γ | X | X | X | X | X | X | X | X | X | X | X |
| CXCL10 | X | X | X | X | X | X | X | X | X | X | X |
| CCL4 | X | X | X | X | X | X | X | X | X | X | X |
| CCL5 | X | X | X | X | X | X | X | X | X | X | X |
| CCL21 | X | X | X | X | X | X | X | X | X | X | X |
| anti-PD1- | X | X | X | X | X | X | X | X | X | X | X |
| VHH-Fc | | | | | | | | | | | |
| anti-TGFb- | X | X | X | X | X | X | X | X | X | X | X |
| VHH(or | | | | | | | | | | | |
| scFv)-Fc | | | | | | | | | | | |
| anti-CD47- | X | X | X | X | X | X | X | X | X | X | X |
| VHH-Fc | | | | | | | | | | | |
| anti-DLL3 | X | X | X | X | X | X | X | X | X | X | X |
| bipartite | | | | | | | | | | | |
| polypeptide | | | | | | | | | | | |
| anti-FAP | X | X | X | X | X | X | X | X | X | X | X |
| bipartite | | | | | | | | | | | |
| polypeptide | | | | | | | | | | | |
| anti-EpCAM | X | X | X | X | X | X | X | X | X | X | X |
| bipartite | | | | | | | | | | | |
| polypeptide | | | | | | | | | | | |
| Survivin | X | X | X | X | X | X | X | X | X | X | X |
| MAGE family | X | X | X | X | X | X | X | X | X | X | X |
| protein | | | | | | | | | | | |
| IL15R | X | X | X | X | X | X | X | X | X | X | X |
| PGDH | X | X | X | X | X | X | X | X | X | X | X |
| ADA | X | X | X | X | X | X | X | X | X | X | X |
| ADA2 | X | X | X | X | X | X | X | X | X | X | X |
| HYAL1 | X | X | X | X | X | X | X | X | X | X | X |
| HYAL2 | X | X | X | X | X | X | X | X | X | X | X |
| CHIPS | X | X | X | X | X | X | X | X | X | X | X |
| MLKL (or its | X | X | X | X | X | X | X | X | X | X | X |
| 4HB domain | | | | | | | | | | | |
| only) | | | | | | | | | | | |
| GSDMD (or | X | X | X | X | X | X | X | X | X | X | X |
| its L192A | | | | | | | | | | | |
| mutant, or its | | | | | | | | | | | |
| amino acids | | | | | | | | | | | |
| 1-233 | | | | | | | | | | | |
| fragment, or | | | | | | | | | | | |
| its amino | | | | | | | | | | | |
| acids 1-233 | | | | | | | | | | | |
| fragment with | | | | | | | | | | | |
| L192A | | | | | | | | | | | |
| mutation) | | | | | | | | | | | |
| GSDME (or | X | X | X | X | X | X | X | X | X | X | X |
| its amino acid | | | | | | | | | | | |
| 1-237 | | | | | | | | | | | |
| fragment) | | | | | | | | | | | |
| HMGB1 (or | X | X | X | X | X | X | X | X | X | X | X |
| its Box B | | | | | | | | | | | |
| domain only) | | | | | | | | | | | |
| Melittin (e.g., | X | X | X | X | X | X | X | X | X | X | X |
| alpha- | | | | | | | | | | | |
| Melittin) | | | | | | | | | | | |
| SMAC/Diablo | X | X | X | X | X | X | X | X | X | X | X |
| (or its amino | | | | | | | | | | | |
| acid 56-239 | | | | | | | | | | | |
| fragment) | | | | | | | | | | | |
| Snake LAAO | X | X | X | X | X | X | X | X | X | X | X |
| Snake | X | X | X | X | X | X | X | X | X | X | X |
| disintegrin | | | | | | | | | | | |
| Leptin | X | X | X | X | X | X | X | X | X | X | X |
| FLT3L | X | X | X | X | X | X | X | X | X | X | X |
| TRAIL | X | X | X | X | X | X | X | X | X | X | X |
| Gasdermin D | X | X | X | X | X | X | X | X | X | X | X |
| or a truncation | | | | | | | | | | | |
| thereof | | | | | | | | | | | |
| Gasdermin E | X | X | X | X | X | X | X | X | X | X | X |
| or a truncation | | | | | | | | | | | |
| thereof | | | | | | | | | | | |
| Tumor | X | X | X | X | X | X | X | X | X | X | X |
| associated | | | | | | | | | | | |
| antigen | | | | | | | | | | | |
| Tumor | X | X | X | X | X | X | X | X | X | X | X |
| neoantigen | | | | | | | | | | | |
| Bipartite | X | X | X | X | X | X | X | X | X | X | X |
| polypeptide | | | | | | | | | | | |
| binding to | | | | | | | | | | | |
| MHC-peptide | | | | | | | | | | | |
| antigen | | | | | | | | | | | |
| complex | | | | | | | | | | | |
| Fusogenic | X | X | X | X | X | X | X | X | X | X | X |
| protein | | | | | | | | | | | |

| | | anti- | anti- | anti- | | | anti- | |
|---|---|---|---|---|---|---|---|---|
| | | PD1- | TGFb- | CD47- | anti-DLL3 | anti-FAP | EpCAM | |
| | | VHH- | VHH(or | VHH- | bipartite | bipartite | bipartite | |
| | CCL21 | Fc | scFv)-Fc | Fc | polypeptide | polypeptide | polypeptide | Survivin |
| IFNg | X | X | X | X | X | X | X | X |
| GM-CSF | X | X | X | X | X | X | X | X |
| IL-2 | X | X | X | X | X | X | X | X |
| IL-12 | X | X | X | X | X | X | X | X |
| IL-15 | X | X | X | X | X | X | X | X |
| IL-18 | X | X | X | X | X | X | X | X |
| IL-23 | X | X | X | X | X | X | X | X |
| IL-36γ | X | X | X | X | X | X | X | X |
| CXCL10 | X | X | X | X | X | X | X | X |
| CCL4 | X | X | X | X | X | X | X | X |
| CCL5 | X | X | X | X | X | X | X | X |
| CCL21 | X | X | X | X | X | X | X | X |
| anti-PD1- | X | X | X | X | X | X | X | X |
| VHH-Fc | | | | | | | | |
| anti-TGFb- | X | X | X | X | X | X | X | X |
| VHH(or | | | | | | | | |
| scFv)-Fc | | | | | | | | |
| anti-CD47- | X | X | X | X | X | X | X | X |
| VHH-Fc | | | | | | | | |
| anti-DLL3 | X | X | X | X | X | X | X | X |
| bipartite | | | | | | | | |
| polypeptide | | | | | | | | |
| anti-FAP | X | X | X | X | X | X | X | X |
| bipartite | | | | | | | | |
| polypeptide | | | | | | | | |
| anti-EpCAM | X | X | X | X | X | X | X | X |
| bipartite | | | | | | | | |
| polypeptide | | | | | | | | |
| Survivin | X | X | X | X | X | X | X | X |
| MAGE family | X | X | X | X | X | X | X | X |
| protein | | | | | | | | |
| IL15R | X | X | X | X | X | X | X | X |
| PGDH | X | X | X | X | X | X | X | X |
| ADA | X | X | X | X | X | X | X | X |
| ADA2 | X | X | X | X | X | X | X | X |
| HYAL1 | X | X | X | X | X | X | X | X |
| HYAL2 | X | X | X | X | X | X | X | X |
| CHIPS | X | X | X | X | X | X | X | X |
| MLKL (or its | X | X | X | X | X | X | X | X |
| 4HB domain | | | | | | | | |
| only) | | | | | | | | |
| GSDMD (or | X | X | X | X | X | X | X | X |
| its L192A | | | | | | | | |
| mutant, or its | | | | | | | | |
| amino acids | | | | | | | | |
| 1-233 | | | | | | | | |
| fragment, or | | | | | | | | |
| its amino | | | | | | | | |
| acids 1-233 | | | | | | | | |
| fragment with | | | | | | | | |
| L192A | | | | | | | | |
| mutation) | | | | | | | | |
| GSDME (or | X | X | X | X | X | X | X | X |
| its amino acid | | | | | | | | |
| 1-237 | | | | | | | | |
| fragment) | | | | | | | | |
| HMGB1 (or | X | X | X | X | X | X | X | X |
| its Box B | | | | | | | | |
| domain only) | | | | | | | | |
| Melittin (e.g., | X | X | X | X | X | X | X | X |
| alpha- | | | | | | | | |
| Melittin) | | | | | | | | |
| SMAC/Diablo | X | X | X | X | X | X | X | X |
| (or its amino | | | | | | | | |
| acid 56-239 | | | | | | | | |
| fragment) | | | | | | | | |
| Snake LAAO | X | X | X | X | X | X | X | X |
| Snake | X | X | X | X | X | X | X | X |
| disintegrin | | | | | | | | |
| Leptin | X | X | X | X | X | X | X | X |
| FLT3L | X | X | X | X | X | X | X | X |
| TRAIL | X | X | X | X | X | X | X | X |
| Gasdermin D | X | X | X | X | X | X | X | X |
| or a truncation | | | | | | | | |
| thereof | | | | | | | | |
| Gasdermin E | X | X | X | X | X | X | X | X |
| or a truncation | | | | | | | | |
| thereof | | | | | | | | |
| Tumor | X | X | X | X | X | X | X | X |
| associated | | | | | | | | |
| antigen | | | | | | | | |
| Tumor | X | X | X | X | X | X | X | X |
| neoantigen | | | | | | | | |
| Bipartite | X | X | X | X | X | X | X | X |
| polypeptide | | | | | | | | |
| binding to | | | | | | | | |
| MHC-peptide | | | | | | | | |
| antigen | | | | | | | | |
| complex | | | | | | | | |
| Fusogenic | X | X | X | X | X | X | X | X |
| protein | | | | | | | | |

| | MAGE | | | | | | | | MLKL |
|---|---|---|---|---|---|---|---|---|---|
| | family | | | | | | | | (or its 4HB |
| | protein | IL15R | PGDH | ADA | ADA2 | HYAL1 | HYAL2 | CHIPS | domain only) |
| IFNg | X | X | X | X | X | X | X | X | X |
| GM-CSF | X | X | X | X | X | X | X | X | X |
| IL-2 | X | X | X | X | X | X | X | X | X |
| IL-12 | X | X | X | X | X | X | X | X | X |
| IL-15 | X | X | X | X | X | X | X | X | X |
| IL-18 | X | X | X | X | X | X | X | X | X |
| IL-23 | X | X | X | X | X | X | X | X | X |
| IL-36γ | X | X | X | X | X | X | X | X | X |
| CXCL10 | X | X | X | X | X | X | X | X | X |
| CCL4 | X | X | X | X | X | X | X | X | X |
| CCL5 | X | X | X | X | X | X | X | X | X |
| CCL21 | X | X | X | X | X | X | X | X | X |
| anti-PD1- | X | X | X | X | X | X | X | X | X |
| VHH-Fc | | | | | | | | | |
| anti-TGFb- | X | X | X | X | X | X | X | X | X |
| VHH(or | | | | | | | | | |
| scFv)-Fc | | | | | | | | | |
| anti-CD47- | X | X | X | X | X | X | X | X | X |
| VHH-Fc | | | | | | | | | |
| anti-DLL3 | X | X | X | X | X | X | X | X | X |
| bipartite | | | | | | | | | |
| polypeptide | | | | | | | | | |
| anti-FAP | X | X | X | X | X | X | X | X | X |
| bipartite | | | | | | | | | |
| polypeptide | | | | | | | | | |
| anti-EpCAM | X | X | X | X | X | X | X | X | X |
| bipartite | | | | | | | | | |
| polypeptide | | | | | | | | | |
| Survivin | X | X | X | X | X | X | X | X | X |
| MAGE family | X | X | X | X | X | X | X | X | X |
| protein | | | | | | | | | |
| IL15R | X | X | X | X | X | X | X | X | X |
| PGDH | X | X | X | X | X | X | X | X | X |
| ADA | X | X | X | X | X | X | X | X | X |
| ADA2 | X | X | X | X | X | X | X | X | X |
| HYAL1 | X | X | X | X | X | X | X | X | X |
| HYAL2 | X | X | X | X | X | X | X | X | X |
| CHIPS | X | X | X | X | X | X | X | X | X |
| MLKL (or its | X | X | X | X | X | X | X | X | X |
| 4HB domain | | | | | | | | | |
| only) | | | | | | | | | |
| GSDMD (or | X | X | X | X | X | X | X | X | X |
| its L192A | | | | | | | | | |
| mutant, or its | | | | | | | | | |
| amino acids | | | | | | | | | |
| 1-233 | | | | | | | | | |
| fragment, or | | | | | | | | | |
| its amino | | | | | | | | | |
| acids 1-233 | | | | | | | | | |
| fragment with | | | | | | | | | |
| L192A | | | | | | | | | |
| mutation) | | | | | | | | | |
| GSDME (or | X | X | X | X | X | X | X | X | X |
| its amino acid | | | | | | | | | |
| 1-237 | | | | | | | | | |
| fragment) | | | | | | | | | |
| HMGB1 (or | X | X | X | X | X | X | X | X | X |
| its Box B | | | | | | | | | |
| domain only) | | | | | | | | | |
| Melittin (e.g., | X | X | X | X | X | X | X | X | X |
| alpha- | | | | | | | | | |
| Melittin) | | | | | | | | | |
| SMAC/Diablo | X | X | X | X | X | X | X | X | X |
| (or its amino | | | | | | | | | |
| acid 56-239 | | | | | | | | | |
| fragment) | | | | | | | | | |
| Snake LAAO | X | X | X | X | X | X | X | X | X |
| Snake | X | X | X | X | X | X | X | X | X |
| disintegrin | | | | | | | | | |
| Leptin | X | X | X | X | X | X | X | X | X |
| FLT3L | X | X | X | X | X | X | X | X | X |
| TRAIL | X | X | X | X | X | X | X | X | X |
| Gasdermin D | X | X | X | X | X | X | X | X | X |
| or a truncation | | | | | | | | | |
| thereof | | | | | | | | | |
| Gasdermin E | X | X | X | X | X | X | X | X | X |
| or a truncation | | | | | | | | | |
| thereof | | | | | | | | | |
| Tumor | X | X | X | X | X | X | X | X | X |
| associated | | | | | | | | | |
| antigen | | | | | | | | | |
| Tumor | X | X | X | X | X | X | X | X | X |
| neoantigen | | | | | | | | | |
| Bipartite | X | X | X | X | X | X | X | X | X |
| polypeptide | | | | | | | | | |
| binding to | | | | | | | | | |
| MHC-peptide | | | | | | | | | |
| antigen | | | | | | | | | |
| complex | | | | | | | | | |
| Fusogenic | X | X | X | X | X | X | X | X | X |
| protein | | | | | | | | | |

| | GSDMD (or | | | | | | | |
|---|---|---|---|---|---|---|---|---|
| | its L192A | | | | | | | |
| | mutant, or | | | | | | | |
| | its amino | | | | | | | |
| | acids 1-233 | | | | | | | |
| | fragment, | | | | SMAC/ | | | |
| | or its amino | | HMGB1 | | Diablo | | | |
| | acids 1-233 | GSDME | (or its | Melittin | (or its | | | |
| | fragment | (or its amino | Box B | (e.g., | amino acid | | Snake | |
| | with L192A | acid 1-237 | domain | alpha- | 56-239 | Snake | dis- | |
| | mutation) | fragment) | only) | Melittin) | fragment) | LAAO | integrin | Leptin |
| IFNg | X | X | X | X | X | X | X | X |
| GM-CSF | X | X | X | X | X | X | X | X |
| IL-2 | X | X | X | X | X | X | X | X |
| IL-12 | X | X | X | X | X | X | X | X |
| IL-15 | X | X | X | X | X | X | X | X |
| IL-18 | X | X | X | X | X | X | X | X |
| IL-23 | X | X | X | X | X | X | X | X |
| IL-36γ | X | X | X | X | X | X | X | X |
| CXCL10 | X | X | X | X | X | X | X | X |
| CCL4 | X | X | X | X | X | X | X | X |
| CCL5 | X | X | X | X | X | X | X | X |
| CCL21 | X | X | X | X | X | X | X | X |
| anti-PD1- | X | X | X | X | X | X | X | X |
| VHH-Fc | | | | | | | | |
| anti-TGFb- | X | X | X | X | X | X | X | X |
| VHH(or | | | | | | | | |
| scFv)-Fc | | | | | | | | |
| anti-CD47- | X | X | X | X | X | X | X | X |
| VHH-Fc | | | | | | | | |
| anti-DLL3 | X | X | X | X | X | X | X | X |
| bipartite | | | | | | | | |
| polypeptide | | | | | | | | |
| anti-FAP | X | X | X | X | X | X | X | X |
| bipartite | | | | | | | | |
| polypeptide | | | | | | | | |
| anti-EpCAM | X | X | X | X | X | X | X | X |
| bipartite | | | | | | | | |
| polypeptide | | | | | | | | |
| Survivin | X | X | X | X | X | X | X | X |
| MAGE family | X | X | X | X | X | X | X | X |
| protein | | | | | | | | |
| IL15R | X | X | X | X | X | X | X | X |
| PGDH | X | X | X | X | X | X | X | X |
| ADA | X | X | X | X | X | X | X | X |
| ADA2 | X | X | X | X | X | X | X | X |
| HYAL1 | X | X | X | X | X | X | X | X |
| HYAL2 | X | X | X | X | X | X | X | X |
| CHIPS | X | X | X | X | X | X | X | X |
| MLKL (or its | X | X | X | X | X | X | X | X |
| 4HB domain | | | | | | | | |
| only) | | | | | | | | |
| GSDMD (or | X | X | X | X | X | X | X | X |
| its L192A | | | | | | | | |
| mutant, or its | | | | | | | | |
| amino acids | | | | | | | | |
| 1-233 | | | | | | | | |
| fragment, or | | | | | | | | |
| its amino | | | | | | | | |
| acids 1-233 | | | | | | | | |
| fragment with | | | | | | | | |
| L192A | | | | | | | | |
| mutation) | | | | | | | | |
| GSDME (or | X | X | X | X | X | X | X | X |
| its amino acid | | | | | | | | |
| 1-237 | | | | | | | | |
| fragment) | | | | | | | | |
| HMGB1 (or | X | X | X | X | X | X | X | X |
| its Box B | | | | | | | | |
| domain only) | | | | | | | | |
| Melittin (e.g., | X | X | X | X | X | X | X | X |
| alpha- | | | | | | | | |
| Melittin) | | | | | | | | |
| SMAC/Diablo | X | X | X | X | X | X | X | X |
| (or its amino | | | | | | | | |
| acid 56-239 | | | | | | | | |
| fragment) | | | | | | | | |
| Snake LAAO | X | X | X | X | X | X | X | X |
| Snake | X | X | X | X | X | X | X | X |
| disintegrin | | | | | | | | |
| Leptin | X | X | X | X | X | X | X | X |
| FLT3L | X | X | X | X | X | X | X | X |
| TRAIL | X | X | X | X | X | X | X | X |
| Gasdermin D | X | X | X | X | X | X | X | X |
| or a truncation | | | | | | | | |
| thereof | | | | | | | | |
| Gasdermin E | X | X | X | X | X | X | X | X |
| or a truncation | | | | | | | | |
| thereof | | | | | | | | |
| Tumor | X | X | X | X | X | X | X | X |
| associated | | | | | | | | |
| antigen | | | | | | | | |
| Tumor | X | X | X | X | X | X | X | X |
| neoantigen | | | | | | | | |
| Bipartite | X | X | X | X | X | X | X | X |
| polypeptide | | | | | | | | |
| binding to | | | | | | | | |
| MHC-peptide | | | | | | | | |
| antigen | | | | | | | | |
| complex | | | | | | | | |
| Fusogenic | X | X | X | X | X | X | X | X |
| protein | | | | | | | | |

| | | | | | | | Bipartite | |
|---|---|---|---|---|---|---|---|---|
| | | | | | | | polypeptide | |
| | | | | | | | binding to | |
| | | | Gasdermin | Gasdermin | | | MHC- | |
| | | | D or a | E or a | Tumor | Tumor | peptide | |
| | | | truncation | truncation | associated | neo- | antigen | Fusogenic |
| | FLT3L | TRAIL | thereof | thereof | antigen | antigen | complex | protein |
| IFNg | X | X | X | X | X | X | X | X |
| GM-CSF | X | X | X | X | X | X | X | X |
| IL-2 | X | X | X | X | X | X | X | X |
| IL-12 | X | X | X | X | X | X | X | X |
| IL-15 | X | X | X | X | X | X | X | X |
| IL-18 | X | X | X | X | X | X | X | X |
| IL-23 | X | X | X | X | X | X | X | X |
| IL-36γ | X | X | X | X | X | X | X | X |
| CXCL10 | X | X | X | X | X | X | X | X |
| CCL4 | X | X | X | X | X | X | X | X |
| CCL5 | X | X | X | X | X | X | X | X |
| CCL21 | X | X | X | X | X | X | X | X |
| anti-PD1- | X | X | X | X | X | X | X | X |
| VHH-Fc | | | | | | | | |
| anti-TGFb- | X | X | X | X | X | X | X | X |
| VHH(or | | | | | | | | |
| scFv)-Fc | | | | | | | | |
| anti-CD47- | X | X | X | X | X | X | X | X |
| VHH-Fc | | | | | | | | |
| anti-DLL3 | X | X | X | X | X | X | X | X |
| bipartite | | | | | | | | |
| polypeptide | | | | | | | | |
| anti-FAP | X | X | X | X | X | X | X | X |
| bipartite | | | | | | | | |
| polypeptide | | | | | | | | |
| anti-EpCAM | X | X | X | X | X | X | X | X |
| bipartite | | | | | | | | |
| polypeptide | | | | | | | | |
| Survivin | X | X | X | X | X | X | X | X |
| MAGE family | X | X | X | X | X | X | X | X |
| protein | | | | | | | | |
| IL15R | X | X | X | X | X | X | X | X |
| PGDH | X | X | X | X | X | X | X | X |
| ADA | X | X | X | X | X | X | X | X |
| ADA2 | X | X | X | X | X | X | X | X |
| HYAL1 | X | X | X | X | X | X | X | X |
| HYAL2 | X | X | X | X | X | X | X | X |
| CHIPS | X | X | X | X | X | X | X | X |
| MLKL (or its | X | X | X | X | X | X | X | X |
| 4HB domain | | | | | | | | |
| only) | | | | | | | | |
| GSDMD (or | X | X | X | X | X | X | X | X |
| its L192A | | | | | | | | |
| mutant, or its | | | | | | | | |
| amino acids 1- | | | | | | | | |
| 233 fragment, | | | | | | | | |
| or its amino | | | | | | | | |
| acids 1-233 | | | | | | | | |
| fragment with | | | | | | | | |
| L192A | | | | | | | | |
| mutation) | | | | | | | | |
| GSDME (or | X | X | X | X | X | X | X | X |
| its amino acid | | | | | | | | |
| 1-237 | | | | | | | | |
| fragment) | | | | | | | | |
| HMGB1 (or | X | X | X | X | X | X | X | X |
| its Box B | | | | | | | | |
| domain only) | | | | | | | | |
| Melittin (e.g., | X | X | X | X | X | X | X | X |
| alpha- | | | | | | | | |
| Melittin) | | | | | | | | |
| SMAC/Diablo | X | X | X | X | X | X | X | X |
| (or its amino | | | | | | | | |
| acid 56-239 | | | | | | | | |
| fragment) | | | | | | | | |
| Snake LAAO | X | X | X | X | X | X | X | X |
| Snake | X | X | X | X | X | X | X | X |
| disintegrin | | | | | | | | |
| Leptin | X | X | X | X | X | X | X | X |
| FLT3L | X | X | X | X | X | X | X | X |
| TRAIL | X | X | X | X | X | X | X | X |
| Gasdermin D | X | X | X | X | X | X | X | X |
| or a truncation | | | | | | | | |
| thereof | | | | | | | | |
| Gasdermin E | X | X | X | X | X | X | X | X |
| or a truncation | | | | | | | | |
| thereof | | | | | | | | |
| Tumor | X | X | X | X | X | X | X | X |
| associated | | | | | | | | |
| antigen | | | | | | | | |
| Tumor | X | X | X | X | X | X | X | X |
| neoantigen | | | | | | | | |
| Bipartite | X | X | X | X | X | X | X | X |
| polypeptide | | | | | | | | |
| binding to | | | | | | | | |
| MHC-peptide | | | | | | | | |
| antigen | | | | | | | | |
| complex | | | | | | | | |
| Fusogenic | X | X | X | X | X | X | X | X |
| protein | | | | | | | | |

[0262] In some embodiments, the replicon of the disclosure, or the heterologous polynucleotide of the replicon, comprises coding region for three, or at least three payload molecules according to one of the payload molecule combinations listed in Table 9 below. In some embodiments, the replicon is a SVV derived replicon. In some embodiments, the replicon is a CVA21 derived replicon.

TABLE 9
Three Payload Molecules Combination

| # | Payload Molecule Combination |
|---|---|
| 1 | anti-DLL3 bipartite polypeptide, anti- |
| | FAP bipartite polypeptide, anti-PD1- |
| | VHH-Fc antibody |
| 2 | anti-DLL3 c, anti-FAP bipartite |
| | polypeptide, IL-2 |
| 3 | anti-DLL3 bipartite polypeptide, anti- |
| | FAP bipartite polypeptide, IL-12 |
| 4 | anti-DLL3 bipartite polypeptide, anti- |
| | FAP bipartite polypeptide, IL-18 |
| 5 | anti-DLL3 bipartite polypeptide, anti- |
| | FAP bipartite polypeptide, IL-23 |
| 6 | anti-DLL3 bipartite polypeptide, anti- |
| | FAP bipartite polypeptide, IL-36γ |
| 7 | anti-DLL3 bipartite polypeptide, anti- |
| | FAP bipartite polypeptide, CCL21 |
| 8 | anti-DLL3 bipartite polypeptide, anti- |
| | FAP bipartite polypeptide, CXCL10 |
| 9 | anti-DLL3 bipartite polypeptide, anti- |
| | PD1-VHH-Fc antibody, IL-2 |
| 10 | anti-DLL3 bipartite polypeptide, anti- |
| | PD1-VHH-Fc antibody, IL-12 |
| 11 | anti-DLL3 bipartite polypeptide, anti- |
| | PD1-VHH-Fc antibody, IL-18 |
| 12 | anti-DLL3 bipartite polypeptide, anti- |
| | PD1-VHH-Fc antibody, IL-23 |
| 13 | anti-DLL3 bipartite polypeptide, anti- |
| | PD1-VHH-Fc antibody, IL-36γ |
| 14 | anti-DLL3 bipartite polypeptide, anti- |
| | PD1-VHH-Fc antibody, CCL21 |
| 15 | anti-DLL3 bipartite polypeptide, anti- |
| | PD1-VHH-Fc antibody, CXCL10 |
| 16 | anti-DLL3 bipartite polypeptide, IL-2, |
| | IL-12 |
| 17 | anti-DLL3 bipartite polypeptide, IL-2, |
| | IL-18 |
| 18 | anti-DLL3 bipartite polypeptide, IL-2, |
| | IL-23 |
| 19 | anti-DLL3 bipartite polypeptide, IL-2, |
| | IL-36γ |
| 20 | anti-DLL3 bipartite polypeptide, IL-2, |
| | CCL21 |
| 21 | anti-DLL3 bipartite polypeptide, IL-2, |
| | CXCL10 |
| 22 | anti-DLL3 bipartite polypeptide, IL-12, |
| | IL-18 |
| 23 | anti-DLL3 bipartite polypeptide, IL-12, |
| | IL-23 |
| 24 | anti-DLL3 bipartite polypeptide, IL-12, |
| | IL-36γ |
| 25 | anti-DLL3 bipartite polypeptide, IL-12, |
| | CCL21 |
| 26 | anti-DLL3 bipartite polypeptide, IL-12, |
| | CXCL10 |
| 27 | anti-DLL3 bipartite polypeptide, IL-18, |
| | IL-23 |
| 28 | anti-DLL3 bipartite polypeptide, IL-18, |
| | IL-36γ |
| 29 | anti-DLL3 bipartite polypeptide, IL-18, |
| | CCL21 |
| 30 | anti-DLL3 bipartite polypeptide, IL-18, |
| | CXCL10 |
| 31 | anti-DLL3 bipartite polypeptide, IL-23, |
| | IL-36γ |
| 32 | anti-DLL3 bipartite polypeptide, IL-23, |
| | CCL21 |
| 33 | anti-DLL3 bipartite polypeptide, IL-23, |
| | CXCL10 |
| 34 | anti-DLL3 bipartite polypeptide, IL-36γ, |
| | CCL21 |
| 35 | anti-DLL3 bipartite polypeptide, IL-36γ, |
| | CXCL10 |
| 36 | anti-DLL3 bipartite polypeptide, CCL21, |
| | CXCL10 |
| 37 | anti-FAP bipartite polypeptide, anti-PD1- |
| | VHH-Fc antibody, IL-2 |
| 38 | anti-FAP bipartite polypeptide, anti-PD1- |
| | VHH-Fc antibody, IL-12 |
| 39 | anti-FAP bipartite polypeptide, anti-PD1- |
| | VHH-Fc antibody, IL-18 |
| 40 | anti-FAP bipartite polypeptide, anti-PD1- |
| | VHH-Fc antibody, IL-23 |
| 41 | anti-FAP bipartite polypeptide, anti-PD1- |
| | VHH-Fc antibody, IL-36γ |
| 42 | anti-FAP bipartite polypeptide, anti-PD1- |
| | VHH-Fc antibody, CCL21 |
| 43 | anti-FAP bipartite polypeptide, anti-PD1- |
| | VHH-Fc antibody, CXCL10 |
| 44 | anti-FAP bipartite polypeptide, IL-2, |
| | IL-12 |
| 45 | anti-FAP bipartite polypeptide, IL-2, |
| | IL-18 |
| 46 | anti-FAP bipartite polypeptide, IL-2, |
| | IL-23 |
| 47 | anti-FAP bipartite polypeptide, IL-2, |
| | IL-36γ |
| 48 | anti-FAP bipartite polypeptide, IL-2, |
| | CCL21 |
| 49 | anti-FAP bipartite polypeptide, IL-2, |
| | CXCL10 |
| 50 | anti-FAP bipartite polypeptide, IL-12, |
| | IL-18 |
| 51 | anti-FAP bipartite polypeptide, IL-12, |
| | IL-23 |
| 52 | anti-FAP bipartite polypeptide, IL-12, |
| | IL-36γ |
| 53 | anti-FAP bipartite polypeptide, IL-12, |
| | CCL21 |
| 54 | anti-FAP bipartite polypeptide, IL-12, |
| | CXCL10 |
| 55 | anti-FAP bipartite polypeptide, IL-18, |
| | IL-23 |
| 56 | anti-FAP bipartite polypeptide, IL-18, |
| | IL-36γ |
| 57 | anti-FAP bipartite polypeptide, IL-18, |
| | CCL21 |
| 58 | anti-FAP bipartite polypeptide, IL-18, |
| | CXCL10 |
| 59 | anti-FAP bipartite polypeptide, IL-23, |
| | IL-36γ |
| 60 | anti-FAP bipartite polypeptide, IL-23, |
| | CCL21 |
| 61 | anti-FAP bipartite polypeptide, IL-23, |
| | CXCL10 |
| 62 | anti-FAP bipartite polypeptide, IL-36γ, |
| | CCL21 |
| 63 | anti-FAP bipartite polypeptide, IL-36γ, |
| | CXCL10 |
| 64 | anti-FAP bipartite polypeptide, |
| | CCL21, CXCL10 |
| 65 | anti-PD1-VHH-Fc antibody, IL-2, |
| | IL-12 |
| 66 | anti-PD1-VHH-Fc antibody, IL-2, |
| | IL-18 |
| 67 | anti-PD1-VHH-Fc antibody, IL-2, |
| | IL-23 |
| 68 | anti-PD1-VHH-Fc antibody, IL-2, |
| | IL-36γ |
| 69 | anti-PD1-VHH-Fc antibody, IL-2, |
| | CCL21 |
| 70 | anti-PD1-VHH-Fc antibody, IL-2, |
| | CXCL10 |
| 71 | anti-PD1-VHH-Fc antibody, IL-12, |
| | IL-18 |
| 72 | anti-PD1-VHH-Fc antibody, IL-12, |
| | IL-23 |
| 73 | anti-PD1-VHH-Fc antibody, IL-12, |
| | IL-36γ |
| 74 | anti-PD1-VHH-Fc antibody, IL-12, |
| | CCL21 |
| 75 | anti-PD1-VHH-Fc antibody, IL-12, |
| | CXCL10 |
| 76 | anti-PD1-VHH-Fc antibody, IL-18, |
| | IL-23 |
| 77 | anti-PD1-VHH-Fc antibody, IL-18, |
| | IL-36γ |
| 78 | anti-PD1-VHH-Fc antibody, IL-18, |
| | CCL21 |
| 79 | anti-PD1-VHH-Fc antibody, IL-18, |
| | CXCL10 |
| 80 | anti-PD1-VHH-Fc antibody, IL-23, |
| | IL-36γ |
| 81 | anti-PD1-VHH-Fc antibody, IL-23, |
| | CCL21 |
| 82 | anti-PD1-VHH-Fc antibody, IL-23, |
| | CXCL10 |
| 83 | anti-PD1-VHH-Fc antibody, IL-36γ, |
| | CCL21 |
| 84 | anti-PD1-VHH-Fc antibody, IL-36γ, |
| | CXCL10 |
| 85 | anti-PD1-VHH-Fc antibody, |
| | CCL21, CXCL10 |
| 86 | IL-2, IL-12, IL-18 |
| 87 | IL-2, IL-12, IL-23 |
| 88 | IL-2, IL-12, IL-36γ |
| 89 | IL-2, IL-12, CCL21 |
| 90 | IL-2, IL-12, CXCL10 |
| 91 | IL-2, IL-18, IL-23 |
| 92 | IL-2, IL-18, IL-36γ |
| 93 | IL-2, IL-18, CCL21 |
| 94 | IL-2, IL-18, CXCL10 |
| 95 | IL-2, IL-23, IL-36γ |
| 96 | IL-2, IL-23, CCL21 |
| 97 | IL-2, IL-23, CXCL10 |
| 98 | IL-2, IL-36γ, CCL21 |
| 99 | IL-2, IL-36γ, CXCL10 |
| 100 | IL-2, CCL21, CXCL10 |
| 101 | IL-12, IL-18, IL-23 |
| 102 | IL-12, IL-18, IL-36γ |
| 103 | IL-12, IL-18, CCL21 |
| 104 | IL-12, IL-18, CXCL10 |
| 105 | IL-12, IL-23, IL-36γ |
| 106 | IL-12, IL-23, CCL21 |
| 107 | IL-12, IL-23, CXCL10 |
| 108 | IL-12, IL-36γ, CCL21 |
| 109 | IL-12, IL-36γ, CXCL10 |
| 110 | IL-12, CCL21, CXCL10 |
| 111 | IL-18, IL-23, IL-36γ |
| 112 | IL-18, IL-23, CCL21 |
| 113 | IL-18, IL-23, CXCL10 |
| 114 | IL-18, IL-36γ, CCL21 |
| 115 | IL-18, IL-36γ, CXCL10 |
| 116 | IL-18, CCL21, CXCL10 |
| 117 | IL-23, IL-36γ, CCL21 |
| 118 | IL-23, IL-36γ, CXCL10 |
| 119 | IL-23, CCL21, CXCL10 |
| 120 | IL-36γ, CCL21, CXCL10 |

[0263] In some embodiments, the anti-DLL3 bipartite polypeptide in Table 8 or Table 9 binds to DLL3 and one of the effector cell antigens listed in Table 3. In some embodiments, the anti-DLL3 bipartite polypeptide in Table 8 or Table 9 binds to DLL3 and one of the effector cell antigens selected from CD3, NKp46 and CD16. In some embodiments, the anti-DLL3 bipartite polypeptide in Table 8 or Table 9 is a BiTE.

[0264] In some embodiments, the anti-FAP bipartite polypeptide in Table 8 or Table 9 binds to FAP and one of the effector cell antigens listed in Table 3. In some embodiments, the anti-FAP bipartite polypeptide in Table 8 or Table 9 binds to FAP and one of the effector cell antigens selected from CD3, NKp46 and CD16. In some embodiments, the anti-FAP bipartite polypeptide in Table 8 or Table 9 is a BiTE.

[0265] In some embodiments, the anti-EpCAM bipartite polypeptide in Table 8 or Table 9 binds to EpCAM and one of the effector cell antigens listed in Table 3. In some embodiments, the anti-EpCAM bipartite polypeptide in Table 8 or Table 9 binds to EpCAM and one of the effector cell antigens selected from CD3, NKp46 and CD16. In some embodiments, the anti-EpCAM bipartite polypeptide in Table 8 or Table 9 is a BiTE.

[0266] In some embodiments, the Various Seneca Valley virus (SVV) derived recombinant RNA replicons comprise a heterologous polynucleotide encoding one or more immunomodulatory proteins (e.g., anti-DLL3 Bi-specific T-cell engager (BiTE)). In some embodiments, the SVV derived recombinant RNA replicons further comprise coding regions for one or more cytokines (e.g., IL-2, IL-12, IL-36γ) and/or one or more chemokines (e.g., CCL21, CCL4). In some embodiments, the SVV derived recombinant RNA replicons comprise coding regions of two or more payload molecules according to Table 10 below.

TABLE 10
Payload Molecules for SVV derived Replicon

| SVV derived Replicon | Payload Molecules |
|---|---|
| Replicon Construct#A1: | anti-DLL3 BiTE, IL-2 |
| Replicon Construct#A2: | anti-DLL3 BiTE, IL-12 |
| Replicon Construct#A3: | anti-DLL3 BiTE, IL-36γ |
| Replicon Construct#A4: | anti-DLL3 BiTE, CCL21 |
| Replicon Construct#A5: | anti-DLL3 BiTE, CCL4 |
| Replicon Construct#A6: | anti-DLL3 BiTE, IL-2, IL-12 |
| Replicon Construct#A7: | anti-DLL3 BiTE, IL-2, IL-36γ |
| Replicon Construct#A8: | anti-DLL3 BiTE, IL-2, CCL21 |
| Replicon Construct#A9: | anti-DLL3 BiTE, IL-2, CCL4 |
| Replicon Construct#A10: | anti-DLL3 BiTE, IL-12, IL-36γ |
| Replicon Construct#A11: | anti-DLL3 BiTE, IL-12, CCL21 |
| Replicon Construct#A12: | anti-DLL3 BiTE, IL-12, CCL4 |
| Replicon Construct#A13: | anti-DLL3 BiTE, IL-36γ, CCL21 |
| Replicon Construct#A14: | anti-DLL3 BiTE, IL-36γ, CCL4 |
| Replicon Construct#A15: | anti-DLL3 BiTE, CCL21, CCL4 |

[0267] In some embodiments, the Coxsackievirus A21 (CVA21)-derived recombinant RNA replicons comprise a heterologous polynucleotide encoding one or more immunomodulatory proteins (e.g., anti-DLL3 Bi-specific T-cell engager (BiTE)). In some embodiments, the CVA21 derived recombinant RNA replicons further comprise coding regions for one or more cytokines (e.g., IL-2, IL-12, IL-36γ) and/or one or more chemokines (e.g., CCL21, CCL4). In some embodiments, the CVA21 derived recombinant RNA replicons comprise coding regions of two or more payload molecules according to Table 11 below.

TABLE 11
Payload Molecules for CVA21 derived Replicon

| CVA21 derived Replicon | Payload Molecules |
|---|---|
| Replicon Construct#C1: | anti-DLL3 BiTE, IL-2 |
| Replicon Construct#C2: | anti-DLL3 BiTE, IL-12 |
| Replicon Construct#C3: | anti-DLL3 BiTE, IL-36γ |
| Replicon Construct#C4: | anti-DLL3 BiTE, CCL21 |
| Replicon Construct#C5: | anti-DLL3 BiTE, CCL4 |
| Replicon Construct#C6: | anti-DLL3 BiTE, IL-2, IL-12 |
| Replicon Construct#C7: | anti-DLL3 BiTE, IL-2, IL-36γ |
| Replicon Construct#C8: | anti-DLL3 BiTE, IL-2, CCL21 |
| Replicon Construct#C9: | anti-DLL3 BiTE, IL-2, CCL4 |
| Replicon Construct#C10: | anti-DLL3 BiTE, IL-12, IL-36γ |
| Replicon Construct#C11: | anti-DLL3 BiTE, IL-12, CCL21 |
| Replicon Construct#C12: | anti-DLL3 BiTE, IL-12, CCL4 |
| Replicon Construct#C13: | anti-DLL3 BiTE, IL-36γ, CCL21 |
| Replicon Construct#C14: | anti-DLL3 BiTE, IL-36γ, CCL4 |
| Replicon Construct#C15: | anti-DLL3 BiTE, CCL21, CCL4 |

### Internal Ribosome Entry Site

[0268] In some embodiments, the recombinant RNA replicon comprises an IRES outside of the 5′ UTR. In some embodiments, the IRES is located between 5′ UTR and 2B coding region. In some embodiments, the IRES is located between 2A coding region and 2B coding region. In some embodiments, the IRES is located between the payload molecule coding sequence and 2B coding region. In some embodiments, the IRES is located between a CRE and 2B coding region. In some embodiments, the IRES is located between 5′ UTR and the heterologous polynucleotide. In some embodiments, the IRES is located between the CRE and the heterologous polynucleotide. In some embodiments, the IRES is located between a VP coding region and the heterologous polynucleotide. In some embodiments, the IRES is located between 2A coding region and the heterologous polynucleotide. In some embodiments, the IRES is an EMCV IRES. In some embodiments, the replicon is a replicon comprising a SVV genome.

### Trans-Encapsidation

[0269] In some embodiments, the recombinant RNA replicon of the disclosure can be trans-encapsidated by another recombinant RNA molecule encoding an oncolytic virus (e.g., an RNA viral genome). Such recombinant RNA molecule may comprise a viral genome (e.g., a synthetic viral genomes). In some embodiments, such recombinant RNA molecules or RNA viral genome is capable of producing an infectious, lytic virus when introduced into a cell by a non-viral delivery vehicle and does not require additional exogenous genes or proteins to be present in the cell in order to replicate and produce an infectious virus. In some embodiments, such RNA viral genome comprises all the VP coding regions. The expressed viral proteins then mediate viral replication and assembly into an infectious viral particle (which may comprise a capsid protein, an envelope protein, and/or a membrane protein) comprising the RNA viral genome. In some embodiments, the recombinant RNA replicon of the disclosure can be trans-encapsidated by the capsid proteins expressed from such RNA viral genome. In some embodiments, the recombinant RNA replicon can be trans-encapsidated when the recombinant RNA replicon and the RNA viral genome are present in the same cell (e.g., by delivering them into the cell via the particle). As such, the recombinant RNA replicon and the RNA viral genome described herein, when introduced into the same host cell, can produce two groups of viral particles-one group comprises the recombinant RNA replicon, the other group comprises the RNA viral genome, both of which are capable of infecting another host cell.

miRNA Target Sequence (miR-TS) Cassette

[0270] In some embodiments, the recombinant RNA replicon comprises one or more microRNA (miRNA) target sequence (miR-TS) cassettes, wherein the miR-TS cassette comprises one or more miRNA target sequences, and wherein expression of one or more of the corresponding miRNAs in a cell inhibits replication of the replicon in the cell. In some embodiments, the one or more miRNAs are selected from miR-124, miR-1, miR-143, miR-128, miR-219, miR-219a, miR-122, miR-204, miR-217, miR-137, and miR-126. In some embodiments, the miR-TS cassette comprises one or more copies of a miR-124 target sequence, one or more copies of a miR-1 target sequence, and one or more copies of a miR-143 target sequence. In some embodiments, the miR-TS cassette comprises one or more copies of a miR-128 target sequence, one or more copies of a miR-219a target sequence, and one or more copies of a miR-122 target sequence. In some embodiments, the miR-TS cassette comprises one or more copies of a miR-128 target sequence, one or more copies of a miR-204 target sequence, and one or more copies of a miR-219 target sequence. In some embodiments, the miR-TS cassette comprises one or more copies of a miR-217 target sequence, one or more copies of a miR-137 target sequence, and one or more copies of a miR-126 target sequence.

[0271] In some embodiments, the recombinant RNA replicon comprises one or more miR-TS cassettes is incorporated into the 5′ untranslated region (UTR) or 3′ UTR of one or more essential viral genes (protein coding regions). In some embodiments, the recombinant RNA replicon comprises one or more miR-TS cassettes is incorporated into the 5′ untranslated region (UTR) or 3′ UTR of one or more non-essential genes. In some embodiments, the recombinant RNA replicon comprises one or more miR-TS cassettes is incorporated 5′ or 3′ of one or more essential viral genes.

### Methods of Producing Recombinant RNA Replicons

[0272] In some embodiments, the recombinant RNA replicons of the disclosure are produced in vitro using one or more DNA vector templates comprising a polynucleotide encoding the recombinant RNA replicons. The term “vector” is used herein to refer to a nucleic acid molecule capable transferring, encoding, or transporting another nucleic acid molecule. The transferred nucleic acid is generally inserted into the vector nucleic acid molecule. A vector may include sequences that direct autonomous replication in a cell and/or may include sequences sufficient to allow integration into host cell DNA. In some embodiments, the recombinant RNA replicon of the disclosure is produced using one or more viral vectors.

[0273] In some embodiments, the recombinant RNA replicons of the disclosure are produced by introducing a polynucleotide encoding the recombinant RNA replicon (e.g., by means of transfection, transduction, electroporation, and the like) into a suitable host cell in vitro. Suitable host cells include insect and mammalian cell lines. The host cells are cultured for an appropriate amount of time to allow expression of the polynucleotides and production of the recombinant RNA replicons. The recombinant RNA replicons are then isolated from the host cell and formulated for therapeutic use (e.g., encapsulated in a particle). A schematic of the in vitro synthesis of the recombinant RNA replicons with 3′ and 5′ ribozymes is shown in FIG. 26 (using SVV derived replicon as example but it applies to other replicons as well). The same schematic applies to the synthesis of recombinant RNA replicons using other combinations of junctional cleavage sequences.

[0274] In some embodiments, the replication of the recombinant RNA replicons of the disclosure require discrete 5′ and 3′ ends that are native to the viral genome of the replicon. The RNA transcripts produced by T7 RNA polymerase in vitro or by mammalian RNA Pol II contain mammalian 5′ and 3′ UTRs do not contain the discrete, native ends required for production of an infectious RNA virus. For example, the T7 RNA polymerase requires a guanosine residue on the 5′ end of the template polynucleotide in order to initiate transcription. However, SVV begins with a uridine residue on its 5′ end. Thus, the T7 leader sequence, which is required for in vitro transcription of the replicon comprising the SVV viral genome, must be removed to generate the native 5′ SVV terminus required for production of a functional replicon. Therefore, in some embodiments, polynucleotides suitable for use in the production of the recombinant RNA replicons of the disclosure require additional non-viral 5′ and 3′ sequences that enable generation of the discrete 5′ and 3′ ends native to the virus. Such sequences are referred to herein as junctional cleavage sequences (JCS). In some embodiments, the junctional cleavage sequences act to cleave the T7 RNA polymerase or Pol II-encoded RNA transcript at the junction of the viral RNA and the mammalian mRNA sequence such that the non-viral RNA polynucleotides are removed from the transcript in order to maintain the endogenous 5′ and 3′ discrete ends of the viral genome (See schematic shown in FIG. 27). In some embodiments, the junctional cleavage sequences act to generate the appropriate ends during the linearization of the DNA plasmid encoding the recombinant RNA replicons (e.g., the use of 3′ restriction enzyme recognition sequences to produce the appropriate 3′ end upon linearization of the plasmid template and prior to in vitro transcription of the recombinant RNA replicons).

[0275] The nature of the junctional cleavage sequences and the removal of the non-viral RNA from the viral genome transcript can be accomplished by a variety of methods. For example, in some embodiments, the junctional cleavage sequences are targets for RNA interference (RNAi) molecules. “RNA interference molecule” as used herein refers to an RNA polynucleotide that mediates degradation of a target mRNA sequence through endogenous gene silencing pathways (e.g., Dicer and RNA-induced silencing complex (RISC)). Exemplary RNA interference agents include micro RNAs (miRNAs), artificial miRNA (amiRNAs), short hairpin RNAs (shRNAs), and small interfering RNAs (siRNAs). Further, any system for cleaving an RNA transcript at a specific site currently known the art or to be defined in the future can be used to generate the discrete ends native to the virus.

[0276] In some embodiments, the RNAi molecule is a miRNA. A miRNA refers to a naturally-occurring, small non-coding RNA molecule of about 18-25 nucleotides in length that is at least partially complementary to a target mRNA sequence. In animals, genes for miRNAs are transcribed to a primary miRNA (pri-miRNA), which is double stranded and forms a stem-loop structure. Pri-miRNAs are then cleaved in the nucleus by a microprocessor complex comprising the class 2 RNase III, Drosha, and the microprocessor subunit, DCGR8, to form a 70-100 nucleotide precursor miRNA (pre-miRNA). The pre-miRNA forms a hairpin structure and is transported to the cytoplasm where it is processed by the RNase III enzyme, Dicer, into a miRNA duplex of ˜18-25 nucleotides. Although either strand of the duplex may potentially act as a functional miRNA, typically one strand of the miRNA is degraded and only one strand is loaded onto the Argonaute (AGO) nuclease to produce the effector RNA-induced silencing complex (RISC) in which the miRNA and its mRNA target interact (Wahid et al., 1803:11, 2010, 1231-1243). In some embodiments, the 5′ and/or 3′ junctional cleavage sequences are miRNA target sequences.

[0277] In some embodiments, the RNAi molecule is an artificial miRNA (amiRNA) derived from a synthetic miRNA-embedded in a Pol II transcript. (See e.g., Liu et al., Nucleic Acids Res (2008) 36:9; 2811-2834; Zeng et al., Molecular Cell (2002), 9; 1327-1333; Fellman et al., Cell Reports (2013) 5; 1704-1713). In some embodiments, the 5′ and/or 3′ junctional cleavage sequences are amiRNA target sequences.

[0278] In some embodiments, the RNAi molecule is an siRNA molecule. siRNAs refer to double stranded RNA molecules typically about 21-23 nucleotides in length. The duplex siRNA molecule is processed in the cytoplasm by the associates with a multi protein complex called the RNA-induced silencing complex (RISC), during which the “passenger” sense strand is enzymatically cleaved from the duplex. The antisense “guide” strand contained in the activated RISC then guides the RISC to the corresponding mRNA by virtue of sequence complementarity and the AGO nuclease cuts the target mRNA, resulting in specific gene silencing. In some embodiments, the siRNA molecule is derived from an shRNA molecule. shRNAs are single stranded artificial RNA molecules ˜ 50-70 nucleotides in length that form stem-loop structures. Expression of shRNAs in cells is accomplished by introducing a DNA polynucleotide encoding the shRNA by plasmid or viral vector. The shRNA is then transcribed into a product that mimics the stem-loop structure of a pre-miRNA, and after nuclear export the hair-pin is processed by Dicer to form a duplex siRNA molecule which is then further processed by the RISC to mediate target-gene silencing. In some embodiments, the 5′ and/or 3′ junctional cleavage sequences are siRNA target sequences.

[0279] In some embodiments, the junctional cleavage sequences are guide RNA (gRNA) target sequences. In such embodiments, gRNAs can be designed and introduced with a Cas endonuclease with RNase activity (e.g., Cas13) to mediate cleavage of the viral genome transcript at the precise junctional site. In some embodiments, the 5′ and/or 3′ junctional cleavage sequences are gRNA target sequences.

[0280] In some embodiments, the junctional cleavage sequences are pri-miRNA-encoding sequences. Upon transcription of the polynucleotide encoding the viral genome (e.g., the recombinant RNA molecule), these sequences form the pri-miRNA stem-loop structure which is then cleaved in the nucleus by Drosha to cleave the transcript at the precise junctional site. In some embodiments, the 5′ and/or 3′ junctional cleavage sequences are pri-mRNA target sequences.

[0281] In some embodiments, the junctional cleavage sequences are primer binding sequences that facilitate cleavage by the endoribonuclease, RNAseH. In such embodiments, a primer that anneals to the 5′ and/or 3′ junctional cleavage sequence is added to the in vitro reaction along with an RNAseH enzyme. RNAseH specifically hydrolyzes the phosphodiester bonds of RNA which is hybridized to DNA, therefore enabling cleavage of the recombinant RNA replicon intermediates at the precise junctional cleavage sequence to produce the required 5′ and 3′ native ends.

[0282] In some embodiments, the junctional cleavage sequences are restriction enzyme recognition sites and result in the generation of discrete ends of viral transcripts during linearization of the plasmid template runoff RNA synthesis with T7 RNA Polymerase. In some embodiments, the junctional cleavage sequences are Type IIS restriction enzyme recognition sites. Type IIS restriction enzymes comprise a specific group of enzymes which recognize asymmetric DNA sequences and cleave at a defined distance outside of their recognition sequence, usually within 1 to 20 nucleotides. Exemplary Type IIS restriction enzymes include AcuI, AlwI, BaeI, BbsI, BbvI, BccI, BceAI, BcgI, BciVI, BcoDI, BfuAI, BmrI, BpmI, BpuEI, BsaI, BsaXI, BseRI, BsgI, BsmAI, BsmBi, BsmFI, BsmI, BspCNI, BspMI, BspQI, BsrDI, BsrI, BtgZI, BtsCI, BstI, CaspCI, EarI, EciI, Esp3I, FauI, FokI, HgaI, HphI, HpyAV, MbolI, MlyI, MmeI, MnlL, NmeAIII, PleI, SapI, and SfaNI. The recognition sequences for these Type IIS restriction enzymes are known in the art. See the New England Biolabs website located at neb.com/tools-and-resources/selection-charts/type-iis-restriction-enzymes. In some embodiments, the junctional cleavage sequence is a SapI restriction enzyme recognition site.

[0283] In some embodiments, the junctional cleavage sequences are ribozyme-encoding sequences and mediate self-cleavage of the recombinant RNA replicons intermediates to produce the native discrete 5′ and 3′ ends of required for the final recombinant RNA replicons and subsequent production of infectious RNA viruses. Exemplary ribozymes include the Hammerhead ribozyme (e.g., the Hammerhead ribozymes shown in FIGS. 28A-28B), the Varkud satellite (VS) ribozyme, the hairpin ribozyme, the GIR1 branching ribozyme, the glmS ribozyme, the twister ribozyme, the twister sister ribozyme, the pistol ribozyme (e.g., Pistol 1 and Pistol 2 shown in FIGS. 29A-29B), the hatchet ribozyme, and the Hepatitis delta virus ribozyme. In some embodiments, the 5′ and/or 3′ junctional cleavage sequences are ribozyme encoding sequences.

[0284] In some embodiments, the junctional cleavage sequences are sequences encoding ligand-inducible self-cleaving ribozymes, referred to as “aptazymes”. Aptazymes are ribozyme sequences that contain an integrated aptamer domain specific for a ligand. Ligand binding to the apatmer domain triggers activation of the enzymatic activity of the ribozyme, thereby resulting in cleavage of the RNA transcript. Exemplary aptazymes include theophylline-dependent aptazymes (e.g., hammerhead ribozyme linked to a theophylline-dependent apatmer), tetracycline-dependent aptazymes (e.g., hammerhead ribozyme linked to a Tet-dependent aptamer), guanine-dependent aptazymes (e.g., hammerhead ribozyme linked to a guanine-dependent aptamer). In some embodiments, the 5′ and/or 3′ junctional cleavage sequences are aptazyme-encoding sequences.

[0285] In some embodiments, the junctional cleavage sequences are target sequences for an RNAi molecule (e.g., an siRNA molecule, an shRNA molecule, an miRNA molecule, or an amiRNA molecule), a gRNA molecule, or an RNAseH primer. In such embodiments, the junctional cleavage sequence is at least partially complementary to the sequence of the RNAi molecule, gRNA molecule, or primer molecule. Methods of sequence alignment for comparison and determination of percent sequence identity and percent complementarity are well known in the art. Optimal alignment of sequences for comparison can be conducted, e.g., by the homology alignment algorithm of Needleman and Wunsch, (1970) J. Mol. Biol. 48:443, by the search for similarity method of Pearson and Lipman, (1988) Proc. Nat'l. Acad. Sci. USA 85:2444, by computerized implementations of these algorithms (GAP, BESTFIT, FASTA, and TFASTA in the Wisconsin Genetics Software Package, Genetics Computer Group, 575 Science Dr., Madison, WI), by manual alignment and visual inspection (see, e.g., Brent et al., (2003) Current Protocols in Molecular Biology), by use of algorithms know in the art including the BLAST and BLAST 2.0 algorithms, which are described in Altschul et al., (1977) Nuc. Acids Res. 25:3389-3402; and Altschul et al., (1990) J. Mol. Biol. 215:403-410, respectively. Software for performing BLAST analyses is publicly available through the National Center for Biotechnology Information.

[0286] In some embodiments, the 5′ junctional cleavage sequence and 3′ junctional cleavage sequence are from the same group (e.g., are both RNAi target sequences, both ribozyme-encoding sequences, etc.). For example, in some embodiments, the junctional cleavage sequences are RNAi target sequences (e.g., siRNA, shRNA, amiRNA, or miRNA target sequences) and are incorporated into the 5′ and 3′ ends of the polynucleotide encoding the recombinant RNA replicon. In such embodiments, the 5′ and 3′ RNAi target sequence may be the same (i.e., targets for the same siRNA, amiRNA, or miRNA) or different (i.e., the 5′ sequence is a target for one siRNA, shmiRNA, or miRNA and the 3′ sequence is a target for another siRNA, amiRNA, or miRNA). In some embodiments, the junctional cleavage sequences are guide RNA target sequences and are incorporated into the 5′ and 3′ ends of the polynucleotide encoding the recombinant RNA replicon. In such embodiments, the 5′ and 3′ gRNA target sequences may be the same (i.e., targets for the same gRNA) or different (i.e., the 5′ sequence is a target for one gRNA and the 3′ sequence is a target for another gRNA). In some embodiments, the junctional cleavage sequences are pri-mRNA-encoding sequences and are incorporated into the 5′ and 3′ ends of the polynucleotide encoding the recombinant RNA replicon. In some embodiments, the junctional cleavage sequences are ribozyme-encoding sequences and are incorporated immediately 5′ and 3′ of the polynucleotide sequence encoding the recombinant RNA replicon.

[0287] In some embodiments, the 5′ junctional cleavage sequence and 3′ junctional cleavage sequence are from the same group but are different variants or types. For example, in some embodiments, the 5′ and 3′ junctional cleavage sequences may be target sequences for an RNAi molecule, wherein the 5′ junctional cleavage sequence is an siRNA target sequence and the 3′ junctional cleavage sequence is a miRNA target sequence (or vis versa). In some embodiments, the 5′ and 3′ junctional cleavage sequences may be ribozyme-encoding sequences, wherein the 5′ junctional cleavage sequence is a hammerhead ribozyme-encoding sequence and the 3′ junctional cleavage sequence is a hepatitis delta virus ribozyme-encoding sequence.

[0288] In some embodiments, the 5′ junctional cleavage sequence and 3′ junctional cleavage sequence are different types. For example, in some embodiments, the 5′ junctional cleavage sequence is an RNAi target sequence (e.g., an siRNA, an amiRNA, or a miRNA target sequence) and the 3′ junctional cleavage sequence is a ribozyme sequence, an aptazyme sequence, a pri-miRNA sequence, or a gRNA target sequence. In some embodiments, the 5′ junctional cleavage sequence is a ribozyme sequence and the 3′ junctional cleavage sequence is an RNAi target sequence (e.g., an siRNA, an amiRNA, or a miRNA target sequence), an aptazyme sequence, a pri-miRNA-encoding sequence, or a gRNA target sequence. In some embodiments, the 5′ junctional cleavage sequence is an aptazyme sequence and the 3′ junctional cleavage sequence is an RNAi target sequence (e.g., an siRNA, an amiRNA, or a miRNA target sequence), a ribozyme sequence, a pri-miRNA sequence, or a gRNA target sequence. In some embodiments, the 5′ junctional cleavage sequence is a pri-miRNA sequence and the 3′ junctional cleavage sequence is an RNAi target sequence (e.g., an siRNA, an amiRNA, or a miRNA target sequence), a ribozyme sequence, an aptazyme sequence, or a gRNA target sequence. In some embodiments, the 5′ junctional cleavage sequence is a gRNA target sequence and the 3′ junctional cleavage sequence is an RNAi target sequence (e.g., an siRNA, an amiRNA, or a miRNA target sequence), a ribozyme sequence, a pri-miRNA sequence, or an aptazyme sequence.

[0289] Exemplary arrangements of the junctional cleavage sequences relative to the polynucleotide encoding the recombinant RNA replicon are shown below in Tables 12 and 13.

TABLE 12
Symmetrical Junctional Cleavage Sequence (JSC) Arrangements

| 5′ | JCS | | JCS | 3′ |
|---|---|---|---|---|
| | siRNA TS | replicon | siRNA TS | |
| | miR TS | replicon | miR TS | |
| | AmiR TS | replicon | AmiR TS | |
| | gRNA TS | replicon | gRNA TS | |
| | pri-miR | replicon | pri-miR | |
| | ribozyme | replicon | ribozyme | |
| | aptazyme | replicon | aptazyme | |
| | RNAseH primer TS | replicon | RNAseH primer TS | |

TABLE 13
Asymmetrical JCS Arrangements

| 5′ | JCS | | JCS | 3′ |
|---|---|---|---|---|
| | siRNA TS | replicon | miR TS | |
| | siRNA TS | replicon | AmiR TS | |
| | siRNA TS | replicon | gRNA TS | |
| | siRNA TS | replicon | pri-miR | |
| | siRNA TS | replicon | ribozyme | |
| | siRNA TS | replicon | aptazyme | |
| | siRNA TS | replicon | RNAseH primer TS | |
| | siRNA TS | replicon | Restr Enz RS | |
| | miR TS | replicon | siRNA TS | |
| | miR TS | replicon | AmiR TS | |
| | miR TS | replicon | gRNA TS | |
| | miR TS | replicon | pri-miR | |
| | miR TS | replicon | ribozyme | |
| | miR TS | replicon | aptazyme | |
| | miR TS | replicon | RNAseH primer TS | |
| | miR TS | replicon | Restr Enz RS | |
| | AmiR TS | replicon | siRNA TS | |
| | AmiR TS | replicon | miR TS | |
| | AmiR TS | replicon | gRNA TS | |
| | AmiR TS | replicon | pri-miR | |
| | AmiR TS | replicon | ribozyme | |
| | AmiR TS | replicon | aptazyme | |
| | AmiR TS | replicon | RNAseH primer TS | |
| | AmiR TS | replicon | Restr Enz RS | |
| | gRNA TS | replicon | siRNA TS | |
| | gRNA TS | replicon | miR TS | |
| | gRNA TS | replicon | AmiR TS | |
| | gRNA TS | replicon | pri-miR | |
| | gRNA TS | replicon | ribozyme | |
| | gRNA TS | replicon | aptazyme | |
| | gRNA TS | replicon | RNAseH primer TS | |
| | gRNA TS | replicon | Restr Enz RS | |
| | pri-miR | replicon | siRNA TS | |
| | pri-miR | replicon | miR TS | |
| | pri-miR | replicon | AmiR TS | |
| | pri-miR | replicon | gRNA TS | |
| | pri-miR | replicon | ribozyme | |
| | pri-miR | replicon | aptazyme | |
| | pri-miR | replicon | RNAseH primer TS | |
| | pri-miR | replicon | Restr Enz RS | |
| | ribozyme | replicon | siRNA TS | |
| | ribozyme | replicon | miR TS | |
| | ribozyme | replicon | AmiR TS | |
| | ribozyme | replicon | gRNA TS | |
| | ribozyme | replicon | pri-miR | |
| | ribozyme | replicon | aptazyme | |
| | ribozyme | replicon | RNAseH primer TS | |
| | ribozyme | replicon | Restr Enz RS | |
| | aptazyme | replicon | siRNA TS | |
| | aptazyme | replicon | miR TS | |
| | aptazyme | replicon | AmiR TS | |
| | aptazyme | replicon | gRNA TS | |
| | aptazyme | replicon | pri-miR | |
| | aptazyme | replicon | ribozyme | |
| | aptazyme | replicon | RNAseH primer TS | |
| | aptazyme | replicon | Restr Enz RS | |
| | RNAseH primer TS | replicon | siRNA TS | |
| | RNAseH primer TS | replicon | miR TS | |
| | RNAseH primer TS | replicon | AmiR TS | |
| | RNAseH primer TS | replicon | gRNA TS | |
| | RNAseH primer TS | replicon | pri-miR | |
| | RNAseH primer TS | replicon | ribozyme | |
| | RNAseH primer TS | replicon | aptazyme | |
| | RNAseH primer TS | replicon | Restr Enz RS | |

[0290] In some embodiments, the recombinant RNA replicons of the disclosure are produced in vitro by In vitro RNA transcription (See schematic in FIG. 27). The recombinant RNA replicons are then purified and formulated for therapeutic use (e.g., encapsulated into a lipid nanoparticle). In some embodiments, the DNA polynucleotide comprises, from 5′ to 3′: (i) a promoter sequence (e.g., a T7 polymerase promoter); (ii) a 5′ ribozyme sequence; (iii) a polynucleotide encoding the recombinant RNA replicon; and (iv) a 3′ ribozyme sequence. In some embodiments, the DNA polynucleotide comprises, from 5′ to 3′: (i) a promoter sequence (e.g., a T7 polymerase promoter); (ii) a 5′ Hammerhead ribozyme sequence (e.g., a wild type HHR or a modified HHR such as that provided in FIGS. 28A-28B); (iii) a polynucleotide encoding the recombinant RNA replicon; and (iv) a 3′ hepatitis delta virus ribozyme sequence.

[0291] In some embodiments, the DNA polynucleotide comprises, from 5′ to 3′: (i) a promoter sequence (e.g., a T7 polymerase promoter); (ii) a 5′ Hammerhead ribozyme sequence (e.g., a wild type HHR or a modified HHR such as that provided in FIGS. 28A-28B); (iii) a polynucleotide encoding a recombinant RNA replicon; and (iv) a 3′ hepatitis delta virus ribozyme sequence. In some embodiments, the DNA polynucleotide comprises, from 5′ to 3′: (i) a promoter sequence (e.g., a T7 polymerase promoter); (ii) a 5′ Hammerhead ribozyme sequence (e.g., a wild type HHR or a modified HHR such as that provided in FIGS. 28A-28B); (iii) a polynucleotide encoding a recombinant RNA replicon; and (iv) a 3′ hepatitis delta virus ribozyme sequence.

[0292] In some embodiments, the DNA polynucleotide comprises, from 5′ to 3′: (i) a promoter sequence (e.g., a T7 polymerase promoter); (ii) a 5′ ribozyme sequence; (iii) a polynucleotide encoding the recombinant RNA replicon; and (iv) a 3′ restriction enzyme recognition site. In some embodiments, the DNA polynucleotide comprises, from 5′ to 3′: (i) a promoter sequence (e.g., a T7 polymerase promoter); (ii) a 5′ Hammerhead ribozyme sequence (e.g., a wild type HHR or a modified HHR such as that provided in FIGS. 28A-28B); (iii) a polynucleotide encoding the recombinant RNA replicon; and (iv) a 3′ SapI restriction enzyme recognition site.

[0293] In some embodiments, the DNA polynucleotide comprises, from 5′ to 3′: (i) a promoter sequence (e.g., a T7 polymerase promoter); (ii) a 5′ Hammerhead ribozyme sequence (e.g., a wild type HHR or a modified HHR such as that provided in FIGS. 28A-28B); (iii) a polynucleotide encoding recombinant RNA replicon; and (iv) a 3′ SapI restriction enzyme recognition site.

[0294] In some embodiments, the DNA polynucleotide comprises, from 5′ to 3′: (i) a promoter sequence (e.g., a T7 polymerase promoter); (ii) a 5′ Pistol ribozyme sequence (e.g., a Pistol 1 or a Pistol 2 ribozyme sequence shown in FIGS. 29A-29B); (iii) a polynucleotide encoding the recombinant RNA replicon; and (iv) a 3′ SapI restriction enzyme recognition site. In some embodiments, the DNA polynucleotide comprises, from 5′ to 3′: (i) a promoter sequence (e.g., a T7 polymerase promoter); (ii) a 5′ Pistol 1 ribozyme sequence; (iii) a polynucleotide encoding a recombinant RNA replicon; and (iv) a 3′ SapI restriction enzyme recognition site. In some embodiments, the DNA polynucleotide comprises, from 5′ to 3′: (i) a promoter sequence (e.g., a T7 polymerase promoter); (ii) a 5′ Pistol 2 ribozyme sequence; (iii) a polynucleotide encoding a wild type SVV genome; and (iv) a 3′ SapI restriction enzyme recognition site. In some embodiments, the DNA polynucleotide comprises a nucleic acid sequence that is at least 95%, 96%, 97%, 98%, or 99% identical to SEQ ID NO: 15. In some embodiments, the DNA polynucleotide comprises or consists of SEQ ID NO: 15.

[0295] In some embodiments, the DNA polynucleotide comprises, from 5′ to 3′: (i) a promoter sequence (e.g., a T7 polymerase promoter); (ii) a 5′ RNAseH primer binding site; (iii) a polynucleotide encoding the recombinant RNA replicon; and (iv) a 3′ restriction enzyme recognition site. In some embodiments, the DNA vector comprises a polynucleotide comprising, from 5′ to 3′: (i) a promoter sequence (e.g., a T7 polymerase promoter); (ii) a 5′ RNAseH primer binding site; (iii) a polynucleotide encoding recombinant RNA replicons; and (iv) a 3′SapI restriction enzyme recognition site.

### Particles Comprising Recombinant RNA Replicons

[0296] In some embodiments, the recombinant RNA replicons of the disclosure are encapsulated in “particles.” As used herein, a particle refers to a non-tissue derived composition of matter such as liposomes, lipoplexes, nanoparticles, nanocapsules, microparticles, microspheres, lipid particles, exosomes, vesicles, and the like. In some embodiments, the particles are non-proteinaceous and non-immunogenic. In such embodiments, encapsulation of the recombinant RNA replicons of the disclosure allows for delivery of a viral genome without the induction of a systemic, anti-viral immune response and mitigates the effects of neutralizing anti-viral antibodies. Further, encapsulation of the recombinant RNA replicons of the disclosure shields the genomes from degradation and facilitates the introduction into target host cells. In some embodiments, the particles are nanoparticles. In some embodiments, the particles are lipid nanoparticles. In some embodiments, the particles are exosomes.

[0297] The disclosure provides particles comprising a recombinant RNA replicon of the disclosure. In some embodiments, the particle is a lipid nanoparticle. In some embodiments, the particles further comprise a second recombinant RNA molecule encoding an oncolytic virus. In some embodiments, the second recombinant RNA molecule encoding an oncolytic virus comprises a RNA viral genome (e.g., a RNA viral genome of an oncolytic virus). In some embodiments, the oncolytic virus is a picornavirus. In some embodiments, the picornavirus is selected from a senecavirus, a cardiovirus, and an enterovirus. In some embodiments, the picornavirus is a Seneca Valley Virus (SVV). In some embodiments, the picornavirus is a Coxsackievirus. In some embodiments, the picornavirus is an encephalomyocarditis virus (EMCV). In some embodiments, the RNA viral genome comprises intact VP1, VP2, VP3 and VP4 coding regions. In some embodiments, the RNA viral genome comprising intact VP1, VP2, VP3 and VP4 coding regions belongs to the same viral species or the same viral genus as the viral genome of the replicon. In some embodiments, the recombinant RNA replicon can be trans-encapsidated by the capsid proteins expressed from the RNA viral genome comprising intact VP coding regions. In some embodiments, the recombinant RNA replicon can be trans-encapsidated when the recombinant RNA replicon and the RNA viral genome are present in the same cell (e.g., by delivering them into the cell via the particle).

[0298] In some embodiments, the particle is biodegradable in a subject. In such embodiments, multiple doses of the particles can be administered to a subject without an accumulation of particles in the subject. Examples of suitable particles include polystyrene particles, poly(lactic-co-glycolic acid) PLGA particles, polypeptide-based cationic polymer particles, cyclodextrin particles, chitosan particles, lipid based particles, poly(β-amino ester) particles, low-molecular-weight polyethylenimine particles, polyphosphoester particles, disulfide cross-linked polymer particles, polyamidoamine particles, polyethylenimine (PEI) particles, and PLURIONICS stabilized polypropylene sulfide particles.

[0299] In some embodiments, the polynucleotides of the disclosure are encapsulated in inorganic particles. In some embodiments, the inorganic particles are gold nanoparticles (GNP), gold nanorods (GNR), magnetic nanoparticles (MNP), magnetic nanotubes (MNT), carbon nanohorns (CNH), carbon fullerenes, carbon nanotubes (CNT), calcium phosphate nanoparticles (CPNP), mesoporous silica nanoparticles (MSN), silica nanotubes (SNT), or a starlike hollow silica nanoparticles (SHNP).

[0300] In some embodiments, the particles of the disclosure are nanoscopic in size, in order to enhance solubility, avoid possible complications caused by aggregation in vivo and to facilitate pinocytosis. In some embodiments, the particle has an average diameter of about less than about 1000 nm. In some embodiments, the particle has an average diameter of less than about 500 nm. In some embodiments, the particle has an average diameter of between about 30 and about 100 nm, between about 50 and about 100 nm, or between about 75 and about 100 nm. In some embodiments, the particle has an average diameter of between about 30 and about 75 nm or between about 30 and about 50 nm. In some embodiments, the particle has an average diameter between about 100 and about 500 nm. In some embodiments, the particle has an average diameter between about 200 and 400 nm. In some embodiments, the particle has an average size of about 350 nm.

### Exosomes

[0301] In some embodiments, the recombinant RNA replicons of the disclosure are encapsulated in exosomes. Exosomes are small membrane vesicles of endocytic origin that are released into the extracellular environment following fusion of multivesicular bodies with the plasma membrane of the parental cell (e.g., the cell from which the exosome is released, also referred to herein as a donor cell). The surface of an exosome comprises a lipid bilayer derived from the parental cell's cell membrane and can further comprise membrane proteins expressed on the parental cell surface. In some embodiments, exosomes may also contain cytosol from the parental cell. Exosomes are produced by many different cell types including epithelial cells, B and T lymphocytes, mast cells (MC), and dendritic cells (DC) and have been identified in blood plasma, urine, bronchoalveolar lavage fluid, intestinal epithelial cells, and tumor tissues. Because the composition of an exosome is dependent on the parental cell type from which they are derived, there are no “exosome-specific” proteins. However, many exosomes comprise proteins associated with the intracellular vesicles from which the exosome originated in the parental cells (e.g., proteins associated with and/or expressed by endosomes and lysosomes). For example, exosomes can be enriched in antigen presentation molecules such as major histocompatibility complex I and II (MHC-I and MHC-II), tetraspanins (e.g., CD63), several heat shock proteins, cytoskeletal components such as actins and tubulins, proteins involved in intracellular membrane fusion, cell-cell interactions (e.g. CD54), signal transduction proteins, and cytosolic enzymes.

[0302] Exosomes may mediate transfer of cellular proteins from one cell (e.g., a parental cells) to a target or recipient cell by fusion of the exosomal membrane with the plasma membrane of the target cell. As such, modifying the material that is encapsulated by the exosome provides a mechanism by which exogenous agents, such as the polynucleotides described herein, may be introduced to a target cell. Exosomes that have been modified to contain one or more exogenous agents (e.g., a polynucleotide described herein) are referred to herein as “modified exosomes”. In some embodiments, modified exosomes are produced by introduction of the exogenous agent (e.g., a polynucleotide described herein) are introduced into a parental cell. In such embodiments, an exogenous nucleic acid is introduced into the parental, exosome-producing cells such that the exogenous nucleic acid itself, or a transcript of the exogenous nucleic acid is incorporated into the modified exosomes produced from the parental cell. The exogenous nucleic acids can be introduced to the parental cell by means known in the art, for example transduction, transfection, transformation, and/or microinjection of the exogenous nucleic acids.

[0303] In some embodiments, modified exosomes are produced by directly introducing recombinant RNA replicons of the disclosure into an exosome. In some embodiments, recombinant RNA replicons of the disclosure is introduced into an intact exosome. “Intact exosomes” refer to exosomes comprising proteins and/or genetic material derived from the parental cell from which they are produced. Methods for obtaining intact exosomes are known in the art (See e.g., Alvarez-Erviti L. et al., Nat Biotechnol. 2011 April; 29(4):34-5; Ohno S, et al., Mol Ther 2013 January; 21(1):185-91; and EP Patent Publication No. 2010663).

[0304] In some embodiments, recombinant RNA replicons are introduced into empty exosomes. “Empty exosomes” refer to exosomes that lack proteins and/or genetic material (e.g., DNA or RNA) derived from the parental cell. Methods to produce empty exosomes (e.g., lacking parental cell-derived genetic material) are known in the art including UV-exposure, mutation/deletion of endogenous proteins that mediate loading of nucleic acids into exosomes, as well as electroporation and chemical treatments to open pores in the exosomal membranes such that endogenous genetic material passes out of the exosome through the open pores. In some embodiments, empty exosomes are produced by opening the exosomes by treatment with an aqueous solution having a pH from about 9 to about 14 to obtain exosomal membranes, removing intravesicular components (e.g., intravesicular proteins and/or nucleic acids), and reassembling the exosomal membranes to form empty exosomes. In some embodiments, intravesicular components (e.g., intravesicular proteins and/or nucleic acids) are removed by ultracentrifugation or density gradient ultracentrifugation. In some embodiments, the membranes are reassembled by sonication, mechanical vibration, extrusion through porous membranes, electric current, or combinations of one or more of these techniques. In particular embodiments, the membranes are reassembled by sonication.

[0305] In some embodiments, loading of intact or empty exosomes with the recombinant RNA replicons described herein to produce a modified exosome can be achieved using conventional molecular biology techniques such as in vitro transformation, transfection, and/or microinjection. In some embodiments, the exogenous agents (e.g., the polynucleotides described herein) are introduced directly into intact or empty exosomes by electroporation. In some embodiments, the exogenous agents (e.g., the polynucleotides described herein) are introduced directly into intact or empty exosomes by lipofection (e.g., transfection). Lipofection kits suitable for use in the production of exosome according to the present disclosure are known in the art and are commercially available (e.g., FuGENE® HD Transfection Reagent from Roche, and LIPOFECTAMINE™ 2000 from Invitrogen). In some embodiments, the exogenous agents (e.g., the polynucleotides described herein) are introduced directly into intact or empty exosomes by transformation using heat shock. In such embodiments, exosomes isolated from parental cells are chilled in the presence of divalent cations such as Ca²⁺ (in CaCl₂)) in order to permeabilize the exosomal membrane. The exosomes can then be incubated with the exogenous nucleic acids and briefly heat shocked (e.g., incubated at 42° C. for 30-120 seconds). In particular embodiments, loading of empty exosomes with exogenous agents (e.g., the polynucleotides described herein) can be achieved by mixing or co-incubation of the agents with the exosomal membranes after the removal of intravesicular components. The modified exosomes reassembled from the exosomal membranes will, therefore, incorporate the exogenous agents into the intravesicular space. Additional methods for producing exosome encapsulated nucleic acids are known in the art (See e.g., U.S. Pat. Nos. 9,889,210; 9,629,929; and 9,085,778; International PCT Publication Nos. WO 2017/161010 and WO 2018/039119).

[0306] Exosomes can be obtained from numerous different parental cells, including cell lines, bone-marrow derived cells, and cells derived from primary patient samples. Exosomes released from parental cells can be isolated from supernatants of parental cell cultures by means known in the art. For example, physical properties of exosomes can be employed to separate them from a medium or other source material, including separation on the basis of electrical charge (e.g., electrophoretic separation), size (e.g., filtration, molecular sieving, etc.), density (e.g., regular or gradient centrifugation) and Svedberg constant (e.g., sedimentation with or without external force, etc). Alternatively, or additionally, isolation can be based on one or more biological properties, and include methods that can employ surface markers (e.g., for precipitation, reversible binding to solid phase, FACS separation, specific ligand binding, non-specific ligand binding, etc.). Analysis of exosomal surface proteins can be determined by flow cytometry using fluorescently labeled antibodies for exosome-associated proteins such as CD63. Additional markers for characterizing exosomes are described in International PCT Publication No. WO 2017/161010. In yet further contemplated methods, the exosomes can also be fused using chemical and/or physical methods, including PEG-induced fusion and/or ultrasonic fusion.

[0307] In some embodiments, size exclusion chromatography can be utilized to isolate the exosomes. In some embodiments, the exosomes can be further isolated after chromatographic separation by centrifugation techniques (of one or more chromatography fractions), as is generally known in the art. In some embodiments, the isolation of exosomes can involve combinations of methods that include, but are not limited to, differential centrifugation as previously described (See Raposo, G. et al., J. Exp. Med. 183, 1161-1172 (1996)), ultracentrifugation, size-based membrane filtration, concentration, and/or rate zonal centrifugation.

[0308] In some embodiments, the exosomal membrane comprises one or more of phospholipids, glycolipids, fatty acids, sphingolipids, phosphoglycerides, sterols, cholesterols, and phosphatidylserine. In addition, the membrane can comprise one or more polypeptides and one or more polysaccharides, such as glycans. Exemplary exosomal membrane compositions and methods for modifying the relative amount of one or more membrane component are described in International PCT Publication No. WO 2018/039119.

[0309] In some embodiments, the particles are exosomes and have a diameter between about 30 and about 100 nm, between about 30 and about 200 nm, or between about 30 and about 500 nm. In some embodiments, the particles are exosomes and have a diameter between about 10 nm and about 100 nm, between about 20 nm and about 100 nm, between about 30 nm and about 100 nm, between about 40 nm and about 100 nm, between about 50 nm and about 100 nm, between about 60 nm and about 100 nm, between about 70 nm and about 100 nm, between about 80 nm and about 100 nm, between about 90 nm and about 100 nm, between about 100 nm and about 200 nm, between about 100 nm and about 150 nm, between about 150 nm and about 200 nm, between about 100 nm and about 250 nm, between about 250 nm and about 500 nm, or between about 10 nm and about 1000 nm. In some embodiments, the particles are exosomes and have a diameter between about 20 nm and 300 nm, between about 40 nm and 200 nm, between about 20 nm and 250 nm, between about 30 nm and 150 nm, or between about 30 nm and 100 nm.

### Lipid Nanoparticles

[0310] In some embodiments, the recombinant RNA replicons described herein are encapsulated in a lipid nanoparticle (LNP). In certain embodiments, the LNP comprises one or more lipids such as such as triglycerides (e.g. tristearin), diglycerides (e.g. glycerol bahenate), monoglycerides (e.g. glycerol monostearate), fatty acids (e.g. stearic acid), steroids (e.g. cholesterol), and waxes (e.g. cetyl palmitate). In some embodiments, the LNP comprises one or more cationic lipids and one or more helper lipids. In some embodiments, the LNP comprises one or more cationic lipids, a cholesterol, and one or more neutral lipids

[0311] Cationic lipids refer to any of a number of lipid species that carry a net positive charge at a selected pH, such as physiological pH. Such lipids include, but are not limited to 1,2-DiLinoleyloxy-N,N-dimethylaminopropane (DLinDMA), 1,2-Dilinolenyloxy-N,N-dimethylaminopropane (DLenDMA), dioctadecyldimethylammonium (DODMA), distearyldimethylammonium (DSDMA), N,N-dioleyl-N,N-dimethylammonium chloride (DODAC); N-(2,3-dioleyloxy)propyl)-N,N,N-trimethylammonium chloride (DOTMA); N,N-distearyl-N,N-dimethylammonium bromide (DDAB); N-(2,3-dioleoyloxy)propyl)-N,N,N-trimethylammonium chloride (DOTAP); 3-(N-(N′,N′-dimethylaminoethane)-carbamoyl)cholesterol (DC-Chol), and N-(1,2-dimyristyloxyprop-3-yl)-N,N-dimethyl-N-hydroxyethyl ammonium bromide (DMRIE). For example, cationic lipids that have a positive charge at below physiological pH include, but are not limited to, DODAP, DODMA, and DMDMA. In some embodiments, the cationic lipids comprise Cis alkyl chains, ether linkages between the head group and alkyl chains, and 0 to 3 double bonds. Such lipids include, e.g., DSDMA, DLinDMA, DLenDMA, and DODMA. The cationic lipids may comprise ether linkages and pH titratable head groups. Such lipids include, e.g., DODMA.

[0312] In some embodiments, the cationic lipids comprise a protonatable tertiary amine head group. Such lipids are referred to herein as ionizable lipids. Ionizable lipids refer to lipid species comprising an ionizable amine head group and typically comprising a pKa of less than about 7. Therefore, in environments with an acidic pH, the ionizable amine head group is protonated such that the ionizable lipid preferentially interacts with negatively charged molecules (e.g., nucleic acids such as the recombinant polynucleotides described herein) thus facilitating nanoparticle assembly and encapsulation. Therefore, in some embodiments, ionizable lipids can increase the loading of nucleic acids into lipid nanoparticles. In environments where the pH is greater than about 7 (e.g., physiologic pH of ≈7.4), the ionizable lipid comprises a neutral charge. When particles comprising ionizable lipids are taken up into the low pH environment of an endosome (e.g., pH <7), the ionizable lipid is again protonated and associates with the anionic endosomal membranes, promoting release of the contents encapsulated by the particle. In some embodiments, the LNP comprises an ionizable lipid, e.g., a 7.SS-cleavable and pH-responsive Lipid Like Material (such as the COATSOME® SS-Series).

[0313] In some embodiments, the cationic lipid is an ionizable lipid selected from DLinDMA, DLin-KC2-DMA, DLin-MC3-DMA (MC3), COATSOME® SS-LC (former name: SS-18/4PE-13), COATSOME® SS-EC (former name: SS-33/4PE-15), COATSOME® SS-OC, COATSOME® SS-OP, Di((Z)-non-2-en-1-yl)9-((4-dimethylamino)butanoyl)oxy) heptadecanedioate (L-319), or N-(2,3-dioleoyloxy)propyl)-N,N,N-trimethylammonium chloride (DOTAP). In some embodiments, the cationic ionizable lipid is DLin-MC3-DMA (MC3). In some embodiments, the cationic ionizable lipid is COATSOME® SS-LC. In some embodiments, the cationic ionizable lipid is COATSOME® SS-EC. In some embodiments, the cationic ionizable lipid is COATSOME® SS-OC. In some embodiments, the cationic ionizable lipid is COATSOME® SS-OP. In some embodiments, the cationic ionizable lipid is L-319. In some embodiments, the cationic ionizable lipid is DOTAP.

[0314] In some embodiments, the LNPs comprise one or more non-cationic helper lipids (neutral lipids). Exemplary neutral helper lipids include (1,2-dilauroyl-sn-glycero-3-phosphoethanolamine) (DLPE), 1,2-diphytanoyl-sn-glycero-3-phosphoethanolamine (DiPPE), 1,2-distearoyl-sn-glycero-3-phosphocholine (DSPC), 1,2-dipalmitoyl-sn-glycero-3-phosphocholine (DPPC), 1,2-dioleyl-sn-glycero-3-phosphoethanolamine (DOPE), 1,2-dipalmitoyl-sn-glycero-3-phosphoethanolamine (DPPE), 1,2-dimyristoyl-sn-glycero-3-phosphoethanolamine (DMPE), (1,2-dioleoyl-sn-glycero-3-phospho-(1′-rac-glycerol) (DOPG), 1,2-dioleoyl-sn-glycero-3-phosphocholine (DOPC), 1,2-distearoyl-sn-glycero-3-phosphoethanolamine (DSPE), ceramides, sphingomyelins, and cholesterol. In some embodiments, the one or more helper lipids are selected from 1,2-distearoyl-sn-glycero-3-phosphocholine (DSPC); 1,2-dilauroyl-sn-glycero-3-phosphoethanolamine (DLPE); 1,2-dioleoyl-sn-glycero-3-phosphocholine (DOPC); 1,2-dioleoyl-sn-glycero-3-phosphoethanolamine (DOPE); and cholesterol. In some embodiments, the LNPs comprise DSPC. In some embodiments, the LNPs comprise DOPC. In some embodiments, the LNPs comprise DLPE. In some embodiments, the LNPs comprise DOPE.

[0315] The use and inclusion of polyethylene glycol (PEG)-modified phospholipids and derivatized lipids such as derivatized ceramides (PEG-CER), including N-octanoyl-sphingosine-1-[succinyl(methoxy polyethylene glycol)-2000] (C8 PEG-2000 ceramide) in the liposomal and pharmaceutical compositions described herein is also contemplated, preferably in combination with one or more of the compounds and lipids disclosed herein.

[0316] In some embodiments, the lipid nanoparticles may further comprise one or more of PEG-modified lipids that comprise a poly(ethylene)glycol chain of up to 5 kDa in length covalently attached to a lipid comprising one or more C6-C20 alkyls. In some embodiments, the LNPs further comprise 1,2-Distearoyl-sn-glycero-3-phosphoethanolamine-Poly(ethylene glycol) (DSPE-PEG), or 1,2-distearoyl-sn-glycero-3-phosphoethanolamine-N-[amino(polyethylene glycol)] (DSPE-PEG-amine). In some embodiments, the LNPs further comprise a PEG-modified lipid selected from 1,2-distearoyl-sn-glycero-3-phosphoethanolamine-N-[amino(polyethyleneglycol)-5000] (DSPE-PEG5K); 1,2-dipalmitoyl-rac-glycerol methoxypolyethylene glycol-2000 (DPG-PEG2K); 1,2-distearoyl-rac-glycero-3-methylpolyoxyethylene-5000 (DSG-PEG5K); 1,2-distearoyl-rac-glycero-3-methylpolyoxyethylene-2000 (DSG-PEG2K); 1,2-dimyristoyl-rac-glycero-3-methylpolyoxyethylene-5000 (DMG-PEG5K); and 1,2-dimyristoyl-rac-glycero-3-methylpolyoxyethylene-2000 (DMG-PEG2K). In some embodiments, the LNPs further comprise DSPE-PEG5K. In some embodiments, the LNPs further comprise DPG-PEG2K. In some embodiments, the LNPs further comprise DSG-PEG2K. In some embodiments, the LNPs further comprise DMG-PEG2K. In some embodiments, the LNPs further comprise DSG-PEG5K. In some embodiments, the LNPs further comprise DMG-PEG5K. In some embodiments, the PEG-modified lipid comprises about 0.1% to about 1% of the total lipid content in a lipid nanoparticle. In some embodiments, the PEG-modified lipid comprises about 0.1%, about 0.2% about 0.3%, about 0.4%, about 0.5%, about 0.6%, about 0.7%, about 0.8%, about 0.9%, about 1.0%, about 1.5%, about 2.0%, about 2.5%, or about 3.0% of the total lipid content in the lipid nanoparticle.

[0317] In some embodiments, the lipid is modified with a cleavable PEG lipid. Examples of PEG derivatives with cleavable bonds include those modified with peptide bonds (Kulkarni et al. (2014). Mmp-9 responsive PEG cleavable nanovesicles for efficient delivery of chemotherapeutics to pancreatic cancer. Mol Pharmaceutics 11:2390-9; Lin et al. (2015). Drug/dye-loaded, multifunctional peg-chitosan-iron oxide nanocomposites for methotraxate synergistically self-targeted cancer therapy and dual model imaging. ACS Appl Mater Interfaces 7:11908-20.), disulfide keys (Yan et al (2014). A method to accelerate the gelation of disulfide-crosslinked hydrogels. Chin J Polym Sci 33:118-27; Wu & Yan (2015). Copper nanopowder catalyzed cross-coupling of diaryl disulfides with aryl iodides in PEG-400. Synlett 26:537-42), vinyl ether bonds, hydrazone bonds (Kelly et al. (2016). Polymeric prodrug combination to exploit the therapeutic potential of antimicrobial peptides against cancer cells. Org Biomol Chem 14:9278-86.), and ester bonds (Xu et al. (2008). Esterase-catalyzed dePEGylation of pH-sensitive vesicles modified with cleavable PEG-lipid derivatives. J Control Release 130:238-45). See also, Fang et al., (2017) Cleaveable PEGylation: a strategy for overcoming the “PEG dilemma” in efficient drug delivery. Drug Delivery 24:2, 22-32.

[0318] In some embodiments, the PEG lipid is an activated PEG lipid. Exemplary activated PEG lipids include PEG-NH2, PEG-MAL, PEG-NHS, and PEG-ALD. Such functionalized PEG lipids are useful in the conjugation of targeting moieties to lipid nanoparticles to direct the particles to a particular target cell or tissue (e.g., by the attachment of antigen-binding molecules, peptides, glycans, etc.).

[0319] In some embodiments, the LNP comprises a cationic lipid and one or more helper lipids, wherein the cationic lipid is DOTAP. In some embodiments, the LNP comprises a cationic lipid and one or more helper lipids, wherein the cationic lipid is DLin-MC3-DMA (MC3). In some embodiments, the LNP comprises a cationic lipid and one or more helper lipids, wherein the cationic lipid is COATSOME® SS-EC. In some embodiments, the LNP comprises a cationic lipid and one or more helper lipids, wherein the cationic lipid is COATSOME® SS-LC. In some embodiments, the LNP comprises a cationic lipid and one or more helper lipids, wherein the cationic lipid is COATSOME® SS-OC. In some embodiments, the LNP comprises a cationic lipid and one or more helper lipids, wherein the cationic lipid is COATSOME® SS-OP. In some embodiments, the LNP comprises a cationic lipid and one or more helper lipids, wherein the cationic lipid is L-319.

[0320] In some embodiments, the LNP comprises a cationic lipid and one or more helper lipids, wherein the one or more helper lipids comprises cholesterol. In some embodiments, the LNP comprises a cationic lipid and one or more helper lipids, wherein the one or more helper lipids comprises DLPE. In some embodiments, the LNP comprises a cationic lipid and one or more helper lipids, wherein the one or more helper lipids comprises DSPC. In some embodiments, the LNP comprises a cationic lipid and one or more helper lipids, wherein the one or more helper lipids comprises DOPE. In some embodiments, the LNP comprises a cationic lipid and one or more helper lipids, wherein the one or more helper lipids comprises DOPC.

[0321] In some embodiments, the LNP comprises a cationic lipid and at least two helper lipids, wherein the cationic lipid is DOTAP, and the at least two helper lipids comprise cholesterol and DLPE. In some embodiments, the LNP comprises a cationic lipid and at least two helper lipids, wherein the cationic lipid is MC3, and the at least two helper lipids comprise cholesterol and DSPC. In some embodiments, the at least two helper lipids comprise cholesterol and DOPE. In some embodiments, the at least two helper lipids comprise cholesterol and DSPC. In some embodiments, the LNP comprises a cationic lipid and at least three helper lipids, wherein the cationic lipid is DOTAP, and the at least three helper lipids comprise cholesterol, DLPE, and DSPE. In some embodiments, the LNP comprises a cationic lipid and at least three helper lipids, wherein the cationic lipid is MC3, and the at least three helper lipids comprise cholesterol, DSPC, and DMG. In some embodiments, the at least three helper lipids comprise cholesterol, DOPE, and DSPE. In some embodiments, the at least three helper lipids comprise cholesterol, DSPC, and DMG. In some embodiments, the LNP comprises DOTAP, cholesterol, and DLPE. In some embodiments, the LNP comprises MC3, cholesterol, and DSPC. In some embodiments, the LNP comprises DOTAP, cholesterol, and DOPE. In some embodiments, the LNP comprises DOTAP, cholesterol, DLPE, and DSPE. In some embodiments, the LNP comprises MC3, cholesterol, DSPC, and DMG. In some embodiments, the LNP comprises DOTAP, cholesterol, DLPE, and DSPE-PEG. In some embodiments, the LNP comprises MC3, cholesterol, DSPC, and DMG-PEG. In some embodiments, the LNP comprises DOTAP, cholesterol, DOPE, and DSPE. In some embodiments, the LNP comprises DOTAP, cholesterol, DOPE, and DSPE-PEG. In some embodiments, the LNP comprises SS-OC, DSPC, cholesterol, and DPG-PEG (e.g., DPG-PEG2K).

[0322] In some embodiments, the LNP comprises DOTAP, cholesterol (Chol), and DLPE, wherein the ratio of DOTAP:Chol:DLPE (as a percentage of total lipid content) is about 50:35:15. In some embodiments, the LNP comprises DOTAP, cholesterol (Chol), and DLPE, wherein the ratio of DOTAP:Chol:DOPE (as a percentage of total lipid content) is about 50:35:15. In some embodiments, the LNP comprises DOTAP, cholesterol (Chol), DLPE, DSPE-PEG, wherein the ratio of DOTP:Chol:DLPE (as a percentage of total lipid content) is about 50:35:15 and wherein the particle comprises about 0.2% DSPE-PEG. In some embodiments, the LNP comprises MC3, cholesterol (Chol), DSPC, and DMG-PEG, wherein the ratio of MC3:Chol:DSPC:DMG-PEG (as a percentage of total lipid content) is about 49:38.5:11:1.5.

[0323] In some embodiments, the LNP comprises SS-OC, DSPC, cholesterol (Chol), and DPG-PEG2K), wherein the ratio of SS-OC:DSPC:Chol:DPG-PEG2K (as a percentage of total lipid content) is about A:B:C:D, wherein A=40%-60%, B=10%-25%, C=20%-30%, and D=0%-3% and wherein A+B+C+D=100%. In some embodiments, the LNP comprises SS-OC, DSPC, cholesterol (Chol), and DPG-PEG2K, wherein the ratio of SS-OC:DSPC:Chol:DPG-PEG2K (as a percentage of total lipid content) is about A:B:C:D, wherein A=45%-50%, B=20%-25%, C=25%-30%, and D=0%-1% and wherein A+B+C+D=100%. In some embodiments, the LNP comprises SS-OC, DSPC, cholesterol (Chol), and DPG-PEG2K, wherein the ratio of SS-OC:DSPC:Chol:DPG-PEG2K (as a percentage of total lipid content) is about 49:22:28.5:0.5.

[0324] In some embodiments, the LNP comprises SS-OC, DSPC, cholesterol (Chol), and DPG-PEG2K, wherein the ratio of SS-OC:DSPC:Chol:DPG-PEG2K (as a percentage of total lipid content) is about A:B:C:D, wherein A=40%-60%, B=10%-30%, C=20%-45%, and D=0%-3% and wherein A+B+C+D=100%. In some embodiments, the LNP comprises SS-OC, DSPC, cholesterol (Chol), and DPG-PEG2K, wherein the ratio of SS-OC:DSPC:Chol:DPG-PEG2K (as a percentage of total lipid content) is about A:B:C:D, wherein A=40%-60%, B=10%-30%, C=25%-45%, and D=0%-3% and wherein A+B+C+D=100%. In some embodiments, the LNP comprises SS-OC, DSPC, cholesterol (Chol), and DPG-PEG2K, wherein the ratio of SS-OC:DSPC:Chol:DPG-PEG2K (as a percentage of total lipid content) is about A:B:C:D, wherein A=45%-55%, B=10%-20%, C=30%-40%, and D=1%-2% and wherein A+B+C+D=100%. In some embodiments, the LNP comprises SS-OC, DSPC, cholesterol (Chol), and DPG-PEG2K, wherein the ratio of SS-OC:DSPC:Chol:DPG-PEG2K (as a percentage of total lipid content) is about A:B:C:D, wherein A=45%-50%, B=10%-15%, C=35%-40%, and D=1%-2% and wherein A+B+C+D=100%. In some embodiments, the LNP comprises SS-OC, DSPC, cholesterol (Chol), and DPG-PEG2K, wherein the ratio of SS-OC:DSPC:Chol:DPG-PEG2K (as a percentage of total lipid content) is 49:11:38.5:1.5.

[0325] In some embodiments, the LNP comprises SS-OC, DSPC, cholesterol (Chol), and DPG-PEG2K, wherein the ratio of SS-OC:DSPC:Chol:DPG-PEG2K (as a percentage of total lipid content) is about A:B:C:D, wherein A=45%-65%, B=5%-20%, C=20%-45%, and D=0%-3% and wherein A+B+C+D=100%. In some embodiments, the LNP comprises SS-OC, DSPC, cholesterol (Chol), and DPG-PEG2K, wherein the ratio of SS-OC:DSPC:Chol:DPG-PEG2K (as a percentage of total lipid content) is about A:B:C:D, wherein A=50%-60%, B=5%-15%, C=30%-45%, and D=0%-3% and wherein A+B+C+D=100%. In some embodiments, the LNP comprises SS-OC, DSPC, cholesterol (Chol), and DPG-PEG2K, wherein the ratio of SS-OC:DSPC:Chol:DPG-PEG2K (as a percentage of total lipid content) is about A:B:C:D, wherein A=55%-60%, B=5%-15%, C=30%-40%, and D=1%-2% and wherein A+B+C+D=100%. In some embodiments, the LNP comprises SS-OC, DSPC, cholesterol (Chol), and DPG-PEG2K, wherein the ratio of SS-OC:DSPC:Chol:DPG-PEG2K (as a percentage of total lipid content) is about A:B:C:D, wherein A=55%-60%, B=5%-10%, C=30%-35%, and D=1%-2% and wherein A+B+C+D=100%. In some embodiments, the LNP comprises SS-OC, DSPC, cholesterol (Chol), and DPG-PEG2K, wherein the ratio of SS-OC:DSPC:Chol:DPG-PEG2K (as a percentage of total lipid content) is 58:7:33.5:1.5.

[0326] In some embodiments, the nanoparticle is coated with a glycosaminoglycan (GAG) in order to modulate or facilitate uptake of the nanoparticle by target cells. The GAG may be heparin/heparin sulfate, chondroitin sulfate/dermatan sulfate, keratin sulfate, or hyaluronic acid (HA). In a particular embodiment, the surface of the nanoparticle is coated with HA and targets the particles for uptake by tumor cells. In some embodiments, the lipid nanoparticle is coated with an arginine-glycine-aspartate tri-peptide (RGD peptides) (See Ruoslahti, Advanced Materials, 24, 2012, 3747-3756; and Bellis et al., Biomaterials, 32(18), 2011, 4205-4210).

[0327] In some embodiments, the LNPs have an average size of about 50 nm to about 500 nm. For example, in some embodiments, the LNPs have an average size of about 50 nm to about 200 nm, about 100 nm to about 200 nm, about 150 nm to about 200 nm, about 50 nm to about 150 nm, about 100 nm to about 150 nm, about 150 nm to about 500 nm, about 200 nm to about 500 nm, about 300 nm to about 500 nm, about 350 nm to about 500 nm, about 400 nm to about 500 nm, about 425 nm to about 500 nm, about 450 nm to about 500 nm, or about 475 nm to about 500 nm. In some embodiments, the plurality of LNPs have an average size of about 50 nm to about 120 nm. In some embodiments, the plurality of LNPs have an average size of about 50 nm, 60 nm, 70 nm, 80 nm, 90 nm, 100 nm, 110 nm, or about 120 nm. In some embodiments, the plurality of LNPs have an average size of about 100 nm.

[0328] In some embodiments, the LNPs have a neutral charge (e.g., an average zeta-potential of between about 0 mV and 1 mV). In some embodiments, the LNPs have an average zeta-potential of between about 40 mV and about −40 mV. In some embodiments, the LNPs have an average zeta-potential of between about 40 mV and about 0 mV. In some embodiments, the LNPs have an average zeta-potential of between about 35 mV and about 0 mV, about 30 mV and about 0 mV, about 25 mV to about 0 mV, about 20 mV to about 0 mV, about 15 mV to about 0 mV, about 10 mV to about 0 mV, or about 5 mV to about 0 mV. In some embodiments, the LNPs have an average zeta-potential of between about 20 mV and about −40 mV. In some embodiments, the LNPs have an average zeta-potential of between about 20 mV and about −20 mV. In some embodiments, the LNPs have an average zeta-potential of between about 10 mV and about −20 mV. In some embodiments, the LNPs have an average zeta-potential of between about 10 mV and about −10 mV. In some embodiments, the LNPs have an average zeta-potential of about 10 mV, about 9 mV, about 8 mV, about 7 mV, about 6 mV, about 5 mV, about 4 mV, about 3 mV, about 2 mV, about 1 mV, about 0 mV, about −1 mV, about −2 mV, about −3 mV, about −4 mV, about −5 mV, about −6 mV, about −7 mV, about −8 mV, about −9 mV, about −9 mV or about −10 mV.

[0329] In some embodiments, the LNPs have an average zeta-potential of between about 0 mV and −20 mV. In some embodiments, the LNPs have an average zeta-potential of less than about −20 mV. For example in some embodiments, the LNPs have an average zeta-potential of less than about less than about −30 mV, less than about 35 mV, or less than about −40 mV. In some embodiments, the LNPs have an average zeta-potential of between about −50 mV to about-20 mV, about −40 mV to about −20 mV, or about −30 mV to about −20 mV. In some embodiments, the LNPs have an average zeta-potential of about 0 mV, about −1 mV, about −2 mV, about −3 mV, about −4 mV, about −5 mV, about −6 mV, about −7 mV, about −8 mV, about −9 mV, about −10 mV, about −11 mV, about −12 mV, about −13 mV, about −14 mV, about −15 mV, about −16 mV, about −17 mV, about −18 mV, about −19 mV, about −20 mV, about −21 mV, about −22 mV, about −23 mV, about −24 mV, about −25 mV, about −26 mV, about −27 mV, about −28 mV, about −29 mV, about −30 mV, about −31 mV, about −32 mV, about −33 mV, about −34 mV, about −35 mV, about −36 mV, about −37 mV, about −38 mV, about −39 mV, or about −40 mV.

[0330] In some embodiments, the lipid nanoparticles comprise a recombinant nucleic acid molecule described herein and comprise a ratio of lipid (L) to nucleic acid (N) of about 3:1 (L:N). In some embodiments, the lipid nanoparticles comprise a recombinant nucleic acid molecule described herein and comprise an L:N ratio about 4:1, about 5:1, about 6:1, about 7:1, about 8:1, about 9:1, or about 10:1. In some embodiments, the lipid nanoparticles comprise a recombinant nucleic acid molecule described herein and comprise a ratio of lipid (L) to nucleic acid (N) of about 7:1. In some embodiments, the lipid nanoparticles comprise a recombinant nucleic acid molecule described herein and comprise an L:N ratio about 4.5:1, about 4.6:1, about 4.7:1, about 4.8:1, about 4.9:1, about 5:1, about 5.1:1, about 5.2:1, about 5.3:1, about 5.4:1, or about 5.5:1. In some embodiments, the lipid nanoparticles comprise a recombinant nucleic acid molecule described herein and comprise an L:N ratio about 6.5:1, 6.6:1, 6.7:1, 6.8:1, 6.9:1, 7:1, 7.1:1, 7.2:1, 7.3:1, 7.4:1, and 7.5:1.

[0331] In some embodiments, the LNP comprises a lipid formulation selected from one of the formulations listed in Table 14.

TABLE 14
Exemplary Replicon Containing Lipid Nanoparticles

| Formulation | | Ionizable | Cholesterol | Helper | PEGylated | |
|---|---|---|---|---|---|---|
| ID | Buffer | lipid (%) | (%) | lipid (%) | lipid (%) | N:P |
| 70001-5C | PB, pH 5.8 | MC3 | Cholesterol | DSPC | DSPE-PEG5K | 7 |
| | | (49%) | (39.8%) | (11%) | (0.2%) | |
| 70009-1.C | PB, pH 5.8 | MC3 | Cholesterol | DSPC | DSPE-PEG5K | 7 |
| | | (49%) | (39.8%) | (11%) | (0.2%) | |
| 70009-2.C | PB, pH 5.8 | MC3 | Cholesterol | DSPC | DSPE-PEG5K | 7 |
| | | (49%) | (39.8%) | (11%) | (0.2%) | |
| 70009-3.C | PB, pH 5.8 | MC3 | Cholesterol | DSPC | DSPE-PEG5K | 7 |
| | | (49%) | (39.8%) | (11%) | (0.2%) | |
| 70032-1.C | PB, pH 5.8 | MC3 | Cholesterol | DSPC | DSPE-PEG5K | 7 |
| | | (49%) | (39.8%) | (11%) | (0.2%) | |
| 70032-2.C | PB, pH 5.8 | MC3 | Cholesterol | DSPC | DMG-PEG2K | 7 |
| | | (49%) | (38.5%) | (11%) | (1.5%) | |
| 70032-3.C | PB, pH 5.8 | MC3 | Cholesterol | DSPC | DSPE-PEG5K | 5 |
| | | (49%) | (39.8%) | (11%) | (0.2%) | |
| 70032-4.C | PB, pH 5.8 | MC3 | Cholesterol | DSPC | DSPE-PEG5K | 3 |
| | | (49%) | (39.8%) | (11%) | (0.2%) | |
| 70032-5.C | PB, pH 7.4 | DOTAP | Cholesterol | DLPE | DSPE-PEG5K | 5.33 |
| | | (50%) | (34.8%) | (15%) | (0.2%) | |
| 70032-6C | PB, pH 5.8 | MC3 | Cholesterol | DSPC | DSPE-PEG5K | 7 |
| | | (49%) | (39.8%) | (11%) | (0.2%) | |
| 70041-2.C | MB, pH 3.0 | SS-EC | Cholesterol | DSPC | DSPE-PEG5K | 7 |
| | | (49%) | (39.8%) | (11%) | (0.2%) | |
| 70041-3.C | MB, pH 3.0 | SS-LC | Cholesterol | DSPC | DSPE-PEG5K | 7 |
| | | (49%) | (39.8%) | (11%) | (0.2%) | |
| 70041-4.C | MB, pH 3.0 | SS-OC | Cholesterol | DSPC | DSPE-PEG5K | 7 |
| | | (49%) | (39.8%) | (11%) | (0.2%) | |
| 70046-4.C | MB, pH 3.0 | SS-EC | Cholesterol | DOPC | DSG-PEG5K | 9 |
| | | (56%) | (28.0%) | (9%) | (7%) | |
| 70046-5.C | MB, pH 3.0 | SS-LC | Cholesterol | DOPC | DSG-PEG5K | 9 |
| | | (56%) | (28.0%) | (9%) | (7%) | |
| 70046-6.C | MB, pH 3.0 | SS-OC | Cholesterol | DOPC | DSG-PEG5K | 9 |
| | | (56%) | (28.0%) | (9%) | (7%) | |
| 70053-1.C | PB, pH 5.8 | MC3 | Cholesterol | DSPC | DSPE-PEG5K | 7 |
| | | (49%) | (39.8%) | (11%) | (0.2%) | |
| 70053-2.C | MB, pH 3.0 | SS-LC | Cholesterol | DSPC | DSPE-PEG5K | 7 |
| | | (49%) | (39.8%) | (11%) | (0.2%) | |
| 70059-1.C | MB, pH 3.0 | SS-EC | Cholesterol | DSPC | DSPE-PEG5K | 7 |
| | | (49%) | (39.8%) | (11%) | (0.2%) | |
| 70059-2.C | MB, pH 3.0 | SS-EC | Cholesterol | DSPC | DSPE-PEG5K | 7 |
| | | (49%) | (39.5%) | (11%) | (0.5%) | |
| 70059-3.C | MB, pH 3.0 | SS-EC | Cholesterol | DSPC | DSPE-PEG5K | 7 |
| | | (49%) | (39.0%) | (11%) | (1.0%) | |
| 70065-2.C | MB, pH 3.0 | SS-LC | Cholesterol | DSPC | DMG-PEG2K | 7 |
| | | (49%) | (39.5%) | (11%) | (0.5%) | |
| 70065-3.C | MB, pH 3.0 | SS-LC | Cholesterol | DSPC | DMG-PEG2K | 7 |
| | | (49%) | (39.0%) | (11%) | (1.0%) | |
| 70065-4.C | MB, pH 3.0 | SS-LC | Cholesterol | DSPC | DMG-PEG2K | 7 |
| | | (49%) | (38.5%) | (11%) | (1.5%) | |
| 70065-5.C | MB, pH 3.0 | SS-LC | Cholesterol | DSPC | DMG-PEG5K | 7 |
| | | (49%) | (39.5%) | (11%) | (0.5%) | |
| 70065-6.C | MB, pH 3.0 | SS-LC | Cholesterol | DSPC | DMG-PEG5K | 7 |
| | | (49%) | (39.0%) | (11%) | (1.0%) | |
| 70070-1.C | PB, pH 5.8 | MC3 | Cholesterol | DSPC | DSPE-PEG5K | 7 |
| | | (49%) | (39.8%) | (11%) | (0.2%) | |
| 70070-4.C | PB, pH 5.8 | MC3 | Cholesterol | DSPC | DMG-PEG2K | 7 |
| | | (49%) | (39.8%) | (11%) | (0.2%) | |
| 70070-5.C | PB, pH 5.8 | MC3 | Cholesterol | DSPC | DMG-PEG2K | 7 |
| | | (49%) | (38.0%) | (11%) | (2.0%) | |
| 70070-6.C | PB, pH 5.8 | MC3 | Cholesterol | DSPC | DMG-PEG2K | 7 |
| | | (49%) | (35.0%) | (11%) | (5.0%) | |
| 70077-3.C | PB, pH 5.8 | MC3 | Cholesterol | DSPC | DSPE-PEG5K | 7 |
| | | (49%) | (39.8%) | (11%) | (0.2%) | |
| 70077-4.C | MB, pH 3.0 | SS-OC | Cholesterol | DSPC | DSPE-PEG5K | 7 |
| | | (49%) | (39.8%) | (11%) | (0.2%) | |
| 70077-5.C | MB, pH 3.0 | SS-OC | Cholesterol | DSPC | DSG-PEG2K | 7 |
| | | (49%) | (48.5%) | (2%) | (0.5%) | |
| 70077-6.C | MB, pH 3.0 | SS-OC | Cholesterol | DSPC | DPG-PEG2K | 7 |
| | | (49%) | (48.0%) | (2%) | (1.0%) | |
| 70077-7.C | MB, pH 3.0 | SS-OC | Cholesterol | DSPC | DMG-PEG2K | 7 |
| | | (49%) | (47.0%) | (2%) | (2.0%) | |
| 70077-8.C | MB, pH 3.0 | SS-OC | Cholesterol | DSPC | DMG-PEG2K | 7 |
| | | (49%) | (38.5%) | (12%) | (0.5%) | |
| 70077-9.C | MB, pH 3.0 | SS-OC | Cholesterol | DSPC | DSG-PEG2K | 7 |
| | | (49%) | (37.0%) | (12%) | (2.0%) | |
| 70077-10.C | MB, pH 3.0 | SS-OC | Cholesterol | DSPC | DPG-PEG2K | 7 |
| | | (49%) | (28.5%) | (22%) | (0.5%) | |
| 70077-11.C | MB, pH 3.0 | SS-OC | Cholesterol | DSPC | DMG-PEG2K | 7 |
| | | (49%) | (28.0%) | (22%) | (1.0%) | |
| 70087-1.C | PB, pH 5.8 | MC3 | Cholesterol | DSPC | DSPE-PEG5K | 7 |
| | | (49%) | (39.8%) | (11%) | (0.2%) | |
| 70087-2.C | MB, pH 3.0 | SS-OC | Cholesterol | DSPC | DPG-PEG2K | 7 |
| | | (60%) | (28.5%) | (11%) | (0.5%) | |
| 70087-3.C | MB, pH 3.0 | SS-OC | Cholesterol | DSPC | DSG-PEG2K | 7 |
| | | (60%) | (28.5%) | (11%) | (0.5%) | |
| 70087-4.C | MB, pH 3.0 | SS-OC | Cholesterol | DSPC | DMG-PEG2K | 7 |
| | | (60%) | (28.5%) | (11%) | (0.5%) | |
| 70087-5.C | MB, pH 3.0 | SS-OC | Cholesterol | DSPC | DPG-PEG2K | 7 |
| | | (60%) | (27.0%) | (11%) | (1.5%) | |
| 80010-1.C | PB, pH 5.8 | MC3 | Cholesterol | DSPC | DSPE-PEG5K | 7 |
| | | (49%) | (39.8%) | (11%) | (0.2%) | |
| 80010-2.C | MB, pH 3.0 | SS-OC | Cholesterol | DSPC | DPG-PEG2K | 7 |
| | | (49%) | (28.5%) | (22%) | (0.5%) | |
| 80010-3.C | MB, pH 3.0 | SS-OC | Cholesterol | DSPC | DMG-PEG2K | 7 |
| | | (49%) | (28.5%) | (22%) | (0.5%) | |
| 80010-4.C | MB, pH 3.0 | SS-OC | Cholesterol | DSPC | DSG-PEG2K | 7 |
| | | (49%) | (28.5%) | (22%) | (0.5%) | |
| 80010-5.C | MB, pH 3.0 | SS-OC | Cholesterol | DSPC | DPG-PEG2K | 7 |
| | | (49%) | (28.0%) | (22%) | (1.0%) | |
| 80016-1.C | PB, pH 5.8 | MC3 | Cholesterol | DSPC | DSPE-PEG5K | 7 |
| | | (49%) | (39.8%) | (11%) | (0.2%) | |
| 80016-2.C | MB, pH 3.0 | MC3 | Cholesterol | DSPC | DPG-PEG2K | 7 |
| | | (49%) | (28.5%) | (22%) | (0.5%) | |
| 80016-3.C | MB, pH 3.0 | SS-OC | Cholesterol | DSPC | DPG-PEG2K | 5.5 |
| | | (49%) | (26.5%) | (22%) | (0.5%) | |
| 80016-6.C | MB, pH 3.0 | SS-OC | Cholesterol | DSPC | DPG-PEG2K | 7 |
| | | (49%) | (28.5%) | (22%) | (0.5%) | |
| 80016-7.C | MB, pH 3.0 | SS-OC | Cholesterol | DSPC | DPG-PEG2K | 7 |
| | | (49%) | (27.5%) | (22%) | (1.5%) | |
| 80016-9.C | MB, pH 3.0 | L-319 | Cholesterol | DSPC | DMG-PEG2K | 7 |
| | | (49%) | (28.5%) | (22%) | (0.2%) | |
| 80016-10.C | MB, pH 3.0 | L-319 | Cholesterol | DSPC | DMG-PEG2K | 7 |
| | | (49%) | (27.5%) | (22%) | (1.5%) | |
| 80016-11.C | MB, pH 3.0 | L-319 | Cholesterol | DSPC | DMG-PEG2K | 7 |
| | | (49%) | (26.5%) | (22%) | (2.5%) | |
| 80033-1.C | MB, pH 3.0 | SS-OC | Cholesterol | DSPC | DPG-PEG2K | 7 |
| | | (49%) | (28.5%) | (22%) | (0.5%) | |
| 80033-2.C | MB, pH 3.0 | SS-LC | Cholesterol | DSPC | DPG-PEG2K | 7 |
| | | (49%) | (28.5%) | (22%) | (0.5%) | |
| 80033-3.C | MB, pH 3.0 | SS-OP | Cholesterol | DSPC | DPG-PEG2K | 7 |
| | | (49%) | (28.5%) | (22%) | (0.5%) | |
| 80048-1.C | MB, pH 3.0 | SS-OC | Cholesterol | DSPC | DPG-PEG2K | 9 |
| | | (49%) | (35.5%) | (15%) | (0.5%) | |
| 80048-2.C | MB, pH 3.0 | SS-OC | Cholesterol | DSPC | DPG-PEG2K | 5 |
| | | (49%) | (28.5%) | (22%) | (0.5%) | |
| 80048-3.C | MB, pH 3.0 | SS-OC | Cholesterol | DSPC | DPG-PEG2K | 7 |
| | | (49%) | (21.5%) | (29%) | (0.5%) | |
| 80048-4.C | MB, pH 3.0 | SS-OC | Cholesterol | DOPE | DPG-PEG2K | 5 |
| | | (49%) | (21.5%) | (29%) | (0.5%) | |
| 80048-5.C | MB, pH 3.0 | SS-OC | Cholesterol | DOPE | DPG-PEG2K | 9 |
| | | (49%) | (28.5%) | (22%) | (0.5%) | |
| 80048-6.C | MB, pH 3.0 | SS-OC | Cholesterol | DOPE | DPG-PEG2K | 7 |
| | | (49%) | (35.5%) | (15%) | (0.5%) | |
| 80048-7.C | MB, pH 3.0 | SS-OC | Cholesterol | DLPE | DPG-PEG2K | 5 |
| | | (49%) | (35.5%) | (15%) | (0.5%) | |
| 80048-8.C | MB, pH 3.0 | SS-OC | Cholesterol | DLPE | DPG-PEG2K | 7 |
| | | (49%) | (28.5%) | (22%) | (0.5%) | |
| 80048-9.C | MB, pH 3.0 | SS-OC | Cholesterol | DLPE | DPG-PEG2K | 9 |
| | | (49%) | (21.5%) | (29%) | (0.5%) | |
| 80059.1.C | MB, pH 3.0 | SS-OC | Cholesterol | DLPE | DPG-PEG2K | 7 |
| | | (49%) | (28.5%) | (22%) | (0.5%) | |
| 80059-2.C | MB, pH 3.0 | SS-OC | Cholesterol | DLPE | DPG-PEG2K | 7 |
| | | (49%) | (28.5%) | (22%) | (0.5%) | |
| 80130-1.C | MB, pH 3.0 | SS-OC | Cholesterol | DSPC | DPG-PEG2K | 7 |
| | | (49%) | (28.5%) | (22%) | (0.5%) | |
| 80130-2.C | MB, pH 3.0 | SS-OC | Cholesterol | DSPC | DPG-PEG2K | 7 |
| | | (49%) | (28.5%) | (22%) | (0.5%) | |
| 80130-3.C | MB, pH 3.0 | SS-LC | Cholesterol | DSPC | DPG-PEG2K | 7 |
| | | (49%) | (28.5%) | (22%) | (0.5%) | |
| 80139-1.C | MB, pH 3.0 | SS-OC | Cholesterol | DSPC | DPG-PEG2K | 7 |
| | | (49%) | (28.5%) | (22%) | (0.5%) | |

### Therapeutic Compositions and Methods of Use

[0332] One aspect of the disclosure relates to therapeutic compositions comprising the recombinant RNA replicons described herein, or particles comprising recombinant RNA replicons described herein, and methods for the treatment of cancer. Compositions described herein can be formulated in any manner suitable for a desired delivery route. Typically, formulations include all physiologically acceptable compositions including derivatives or prodrugs, solvates, stereoisomers, racemates, or tautomers thereof with any pharmaceutically acceptable carriers, diluents, and/or excipients.

[0333] In some embodiments, the LNP comprising the recombinant RNA replicon (and optionally the RNA viral genome) is capable of producing oncolytic viruses when administered to a subject, wherein the encoded oncolytic virus is capable of reducing the size of a tumor that is remote from the site of administration. For example, intravenous administration of the LNPs may results in replicon replication in tumor tissue and reduction of tumor size. In some embodiments, the LNPs of the disclosure are capable of localizing to tumors or cancerous tissues that are remote from the site of LNP administration. Such effects enable the use of the LNP-encapsulated replicons of the disclosure in the treatment of tumors that are not easily accessible and therefore not suitable for intratumoral delivery of treatment.

[0334] The phrase “pharmaceutically acceptable” is employed herein to refer to those compounds, materials, compositions, and/or dosage forms which are, within the scope of sound medical judgment, suitable for use in contact with the tissues of human beings and animals without excessive toxicity, irritation, allergic response, or other problem or complication, commensurate with a reasonable benefit/risk ratio.

[0335] As used herein “pharmaceutically acceptable carrier, diluent or excipient” includes without limitation any adjuvant, carrier, excipient, glidant, sweetening agent, diluent, preservative, dye/colorant, flavor enhancer, surfactant, wetting agent, dispersing agent, suspending agent, stabilizer, isotonic agent, solvent, surfactant, or emulsifier which has been approved by the United States Food and Drug Administration as being acceptable for use in humans or domestic animals. Exemplary pharmaceutically acceptable carriers include, but are not limited to, to sugars, such as lactose, glucose and sucrose; starches, such as corn starch and potato starch; cellulose, and its derivatives, such as sodium carboxymethyl cellulose, ethyl cellulose and cellulose acetate; tragacanth; malt; gelatin; talc; cocoa butter, waxes, animal and vegetable fats, paraffins, silicones, bentonites, silicic acid, zinc oxide; oils, such as peanut oil, cottonseed oil, safflower oil, sesame oil, olive oil, corn oil and soybean oil; glycols, such as propylene glycol; polyols, such as glycerin, sorbitol, mannitol and polyethylene glycol; esters, such as ethyl oleate and ethyl laurate; agar; buffering agents, such as magnesium hydroxide and aluminum hydroxide; alginic acid; pyrogen-free water; isotonic saline; Ringer's solution; ethyl alcohol; phosphate buffer solutions; and any other compatible substances employed in pharmaceutical formulations.

[0336] “Pharmaceutically acceptable salt” includes both acid and base addition salts. Pharmaceutically-acceptable salts include the acid addition salts (formed with the free amino groups of the protein) and which are formed with inorganic acids such as, for example, hydrochloric acid, hydrobromic acid, sulfuric acid, nitric acid, phosphoric acid and the like, and organic acids such as, but not limited to, acetic acid, 2,2-dichloroacetic acid, adipic acid, alginic acid, ascorbic acid, aspartic acid, benzenesulfonic acid, benzoic acid, 4-acetamidobenzoic acid, camphoric acid, camphor-10-sulfonic acid, capric acid, caproic acid, caprylic acid, carbonic acid, cinnamic acid, citric acid, cyclamic acid, dodecylsulfuric acid, ethane-1,2-disulfonic acid, ethanesulfonic acid, 2-hydroxyethanesulfonic acid, formic acid, fumaric acid, galactaric acid, gentisic acid, glucoheptonic acid, gluconic acid, glucuronic acid, glutamic acid, glutaric acid, 2-oxo-glutaric acid, glycerophosphoric acid, glycolic acid, hippuric acid, isobutyric acid, lactic acid, lactobionic acid, lauric acid, maleic acid, malic acid, malonic acid, mandelic acid, methanesulfonic acid, mucic acid, naphthalene-1,5-disulfonic acid, naphthalene-2-sulfonic acid, 1-hydroxy-2-naphthoic acid, nicotinic acid, oleic acid, orotic acid, oxalic acid, palmitic acid, pamoic acid, propionic acid, pyroglutamic acid, pyruvic acid, salicylic acid, 4-aminosalicylic acid, sebacic acid, stearic acid, succinic acid, tartaric acid, thiocyanic acid, ptoluenesulfonic acid, trifluoroacetic acid, undecylenic acid, and the like. Salts formed with the free carboxyl groups can also be derived from inorganic bases such as, for example, sodium, potassium, lithium, ammonium, calcium, magnesium, iron, zinc, copper, manganese, aluminum salts, and the like. Salts derived from organic bases include, but are not limited to, salts of primary, secondary, and tertiary amines, substituted amines including naturally occurring substituted amines, cyclic amines and basic ion exchange resins, such as ammonia, isopropylamine, trimethylamine, diethylamine, triethylamine, tripropylamine, diethanolamine, ethanolamine, deanol, 2-dimethylaminoethanol, 2-diethylaminoethanol, dicyclohexylamine, lysine, arginine, histidine, caffeine, procaine, hydrabamine, choline, betaine, benethamine, benzathine, ethylenediamine, glucosamine, methylglucamine, theobromine, triethanolamine, tromethamine, purines, piperazine, piperidine, N-ethylpiperidine, polyamine resins and the like. Particularly preferred organic bases are isopropylamine, diethylamine, ethanolamine, trimethylamine, dicyclohexylamine, choline, and caffeine.

[0337] The present disclosure provides methods of killing a cancerous cell or a target cell comprising exposing the cell to an RNA polynucleotide or particle described herein, or composition thereof, under conditions sufficient for the intracellular delivery of the composition to the cancerous cell. As used herein “killing a cancerous cell” refer to the death of a cancerous cell by means of apoptosis or necrosis. Killing of a cancerous cell may be determined by methods known in the art including but not limited to, tumor size measurements, cell counts, and flow cytometry for the detection of cell death markers such as Annexin V and incorporation of propidium iodide.

[0338] The present disclosure further provides methods of treating or preventing cancer in a subject in need thereof wherein an effective amount of the therapeutic compositions described herein is administered to the subject. The route of administration will vary, naturally, with the location and nature of the disease being treated, and may include, for example intradermal, transdermal, subdermal, parenteral, nasal, intravenous, intramuscular, intranasal, subcutaneous, percutaneous, intratracheal, intraperitoneal, intratumoral, perfusion, lavage, direct injection, and oral administration. The encapsulated polynucleotide compositions described herein are useful in the treatment of metastatic cancers, wherein systemic administration may be necessary to deliver the compositions to multiple organs and/or cell types. Therefore, in some embodiments, the compositions described herein are administered systemically

[0339] The present disclosure further provides methods of immunizing a subject against a disease wherein an effective amount of a therapeutic composition described herein is administered to the subject. The route of administration will vary, naturally, with the location and nature of immunization agent, and may include, for example intradermal, transdermal, subdermal, parenteral, nasal, intravenous, intramuscular, intranasal, subcutaneous, percutaneous, intratracheal, intraperitoneal, intratumoral, perfusion, lavage, direct injection, and oral administration.

[0340] The present disclosure further provides a particle of the disclosure, a vector of the disclosure, a recombinant RNA replicon of the disclosure, or compositions thereof, for use as a medicament. In some embodiments, the medicament is for the killing a cancerous cell. In some embodiments, the medicament is for treating cancer. In some embodiments, the medicament is for immunization against a disease.

[0341] An “effective amount” or an “effective dose,” used interchangeably herein, refers to an amount and or dose of the compositions described herein that results in an improvement or remediation of the symptoms of the disease or condition. The improvement is any improvement or remediation of the disease or condition, or symptom of the disease or condition. The improvement is an observable or measurable improvement or may be an improvement in the general feeling of well-being of the subject. Thus, one of skill in the art realizes that a treatment may improve the disease condition but may not be a complete cure for the disease. Improvements in subjects may include, but are not limited to, decreased tumor burden, decreased tumor cell proliferation, increased tumor cell death, activation of immune pathways, increased time to tumor progression, decreased cancer pain, increased survival, or improvements in the quality of life. The effective amount of a particular agent may therefore be represented in a variety of ways based on the nature of the agent, such as mass/volume, #of cells/volume, particles/volume, (mass of the agent)/(mass of the subject), #of cells/(mass of subject), or particles/(mass of subject). The effective amount of a particular agent may also be expressed as the half-maximal effective concentration (EC₅₀), which refers to the concentration of an agent that results in a magnitude of a particular physiological response that is half-way between a reference level and a maximum response level.

[0342] In some embodiments, administration of an effective dose may be achieved with administration a single dose of a composition described herein. As used herein, “dose” refers to the amount of a composition delivered at one time. In some embodiments, the dose of the recombinant RNA molecules is measured as the 50% Tissue culture Infective Dose (TCID₅₀). In some embodiments, the TCID₅₀ is at least about 10³-10⁹ TCID₅₀/mL, for example, at least about 10³ TCID₅₀/mL, about 10⁴ TCID₅₀/mL, about 10⁵ TCID₅₀/mL, about 10⁶ TCID₅₀/mL, about 10⁷ TCID₅₀/mL, about 108 TCID₅₀/mL, or about 10⁹ TCID₅₀/mL. In some embodiments, a dose may be measured by the number of particles in a given volume (e.g., particles/mL). In some embodiments, a dose may be further refined by the genome copy number of the RNA polynucleotides described herein present in each particle (e.g., #of particles/mL, wherein each particle comprises at least one genome copy of the polynucleotide). In some embodiments, delivery of an effective dose may require administration of multiple doses of a composition described herein. As such, administration of an effective dose may require the administration of at least 2, 3, 4, 5, 6, 7, 8, 9, 10, 20, 30, 40, 50, or more doses of a composition described herein.

[0343] In embodiments wherein multiple doses of a composition described herein are administered, each dose need not be administered by the same actor and/or in the same geographical location. Further, the dosing may be administered according to a predetermined schedule. For example, the predetermined dosing schedule may comprise administering a dose of a composition described herein daily, every other day, weekly, bi-weekly, monthly, bi-monthly, annually, semi-annually, or the like. The predetermined dosing schedule may be adjusted as necessary for a given patient (e.g., the amount of the composition administered may be increased or decreased and/or the frequency of doses may be increased or decreased, and/or the total number of doses to be administered may be increased or decreased).

### Definitions

[0344] In the present description, any concentration range, percentage range, ratio range, or integer range is to be understood to include the value of any integer within the recited range and, when appropriate, fractions thereof (such as one tenth and one hundredth of an integer), unless otherwise indicated. It should be understood that the terms “a” and “an” as used herein refer to “one or more” of the enumerated components unless otherwise indicated. The use of the alternative (e.g., “or”) should be understood to mean either one, both, or any combination thereof of the alternatives. As used herein, the terms “include” and “comprise” are used synonymously. As used herein, “plurality” may refer to one or more components (e.g., one or more miRNA target sequences).

[0345] As used in this application, the terms “about” and “approximately” are used as equivalents. Any numerals used in this application with or without about/approximately are meant to cover any normal fluctuations appreciated by one of ordinary skill in the relevant art. In certain embodiments, the term “approximately” or “about” refers to a range of values that fall within 25%, 20%, 19%, 18%, 17%, 16%, 15%, 14%, 13%, 12%, 11%, 10%, 9%, 8%, 7%, 6%, 5%, 4%, 3%, 2%, 1%, or less in either direction (greater than or less than) of the stated reference value unless otherwise stated or otherwise evident from the context (except where such number would exceed 100% of a possible value). In some embodiments, the term “approximately” or “about” refers to a range of values that fall within 10% in either direction (greater than or less than) of the stated reference value unless otherwise stated or otherwise evident from the context (except where such number would exceed 100% of a possible value).

[0346] “Decrease” or “reduce” refers to a decrease or a reduction in a particular value of at least 5%, for example, 5, 6, 7, 8, 9, 10, 15, 20, 25, 30, 35, 40, 45, 50, 55, 60, 65, 70, 75, 80, 85, 90, 95, 99, or 100% as compared to a reference value. A decrease or reduction in a particular value may also be represented as a fold-change in the value compared to a reference value, for example, at least 1, 2, 3, 4, 5, 6, 7, 8, 9, 10, 15, 20, 30, 40, 50, 60, 70, 80, 90, 100, 200, 500, 1000-fold, or more, decrease as compared to a reference value.

[0347] “Increase” refers to an increase in a particular value of at least 5%, for example, 5, 6, 7, 8, 9, 10, 15, 20, 25, 30, 35, 40, 45, 50, 55, 60, 65, 70, 75, 80, 85, 90, 95, 99, 100, 200, 300, 400, 500% or more as compared to a reference value. An increase in a particular value may also be represented as a fold-change in the value compared to a reference value, for example, at least 1-fold, 2, 3, 4, 5, 6, 7, 8, 9, 10, 15, 20, 30, 40, 50, 60, 70, 80, 90, 100, 200, 500, 1000-fold or more, increase as compared to the level of a reference value.

[0348] The term “sequence identity” refers to the percentage of bases or amino acids between two polynucleotide or polypeptide sequences that are the same, and in the same relative position. As such one polynucleotide or polypeptide sequence has a certain percentage of sequence identity compared to another polynucleotide or polypeptide sequence. For sequence comparison, typically one sequence acts as a reference sequence, to which test sequences are compared. The term “reference sequence” refers to a molecule to which a test sequence is compared. The term “mutation” refers to the substitution, deletion or addition of nucleic acids or amino acids. The term “conservative mutation” refers to the substitution of a single amino acid or a small number of amino acids in a polypeptide where the new amino acid has a chemical and physical property (charge, hydrophilicity, etc.) that is similar to the substituted amino acid.

[0349] “Complementary” refers to the capacity for pairing, through base stacking and specific hydrogen bonding, between two sequences comprising naturally or non-naturally occurring (e.g., modified as described above) bases (nucleotides) or analogs thereof. For example, if a base at one position of a nucleic acid is capable of hydrogen bonding with a base at the corresponding position of a target, then the bases are considered to be complementary to each other at that position. Nucleic acids can comprise universal bases, or inert abasic spacers that provide no positive or negative contribution to hydrogen bonding. Base pairings may include both canonical Watson-Crick base pairing and non-Watson-Crick base pairing (e.g., Wobble base pairing and Hoogsteen base pairing). It is understood that for complementary base pairings, adenosine-type bases (A) are complementary to thymidine-type bases (T) or uracil-type bases (U), that cytosine-type bases (C) are complementary to guanosine-type bases (G), and that universal bases such as 3-nitropyrrole or 5-nitroindole can hybridize to and are considered complementary to any A, C, U, or T. Nichols et al., Nature, 1994; 369:492-493 and Loakes et al., Nucleic Acids Res., 1994; 22:4039-4043. Inosine (I) has also been considered in the art to be a universal base and is considered complementary to any A, C, U, or T. See Watkins and SantaLucia, Nucl. Acids Research, 2005; 33 (19): 6258-6267.

[0350] An “expression cassette” or “expression construct” refers to a polynucleotide sequence operably linked to a promoter.

[0351] “Operably linked” refers to a juxtaposition wherein the components so described are in a relationship permitting them to function in their intended manner. For instance, a promoter is operably linked to a polynucleotide sequence if the promoter affects the transcription or expression of the polynucleotide sequence; a cleavage polypeptide is operably linked to a payload molecule if it allows the separation of the payload molecule (e.g., from the rest of the polypeptide) under certain desirable conditions.

[0352] The term “subject” includes animals, such as mammals. In some embodiments, the mammal is a primate. In some embodiments, the mammal is a human. In some embodiments, subjects are livestock such as cattle, sheep, goats, cows, swine, and the like; or domesticated animals such as dogs and cats. In some embodiments (e.g., particularly in research contexts) subjects are rodents (e.g., mice, rats, hamsters), rabbits, primates, or swine such as inbred pigs and the like. The terms “subject” and “patient” are used interchangeably herein. In some embodiments, the methods of the present disclosure are employed to treat a human subject. The methods of the present disclosure may also be employed to treat non-human primates (e.g., monkeys, baboons, and chimpanzees), mice, rats, bovines, horses, cats, dogs, pigs, rabbits, goats, deer, sheep, ferrets, gerbils, guinea pigs, hamsters, bats, birds, and reptiles.

[0353] As used herein “prevention” or “prophylaxis” can mean complete prevention of the symptoms of a disease, a delay in onset of the symptoms of a disease, or a lessening in the severity of subsequently developed disease symptoms.

[0354] “Cancer” herein refers to or describes the physiological condition in mammals that is typically characterized by unregulated cell growth. Examples of cancer include but are not limited to carcinoma, lymphoma, blastoma, sarcoma (including liposarcoma, osteogenic sarcoma, angiosarcoma, endotheliosarcoma, leiomyosarcoma, chordoma, lymphangiosarcoma, lymphangioendotheliosarcoma, rhabdomyosarcoma, fibrosarcoma, myxosarcoma, and chondrosarcoma), neuroendocrine tumors, mesothelioma, synovioma, schwannoma, meningioma, adenocarcinoma, melanoma, and leukemia or lymphoid malignancies. More particular examples of such cancers include squamous cell cancer (e.g., epithelial squamous cell cancer), lung cancer including small-cell lung cancer, non-small cell lung cancer, adenocarcinoma of the lung and squamous carcinoma of the lung, small cell lung carcinoma, cancer of the peritoneum, hepatocellular cancer, gastric or stomach cancer including gastrointestinal cancer, pancreatic cancer, glioblastoma, cervical cancer, ovarian cancer, liver cancer, bladder cancer, hepatoma, breast cancer, colon cancer, rectal cancer, colorectal cancer, endometrial or uterine carcinoma, salivary gland carcinoma, kidney or renal cancer (e.g., renal cell carcinoma), neuroendocrine cancer, prostate cancer (e.g., Castration resistant neuroendocrine prostate cancer), vulvar cancer, thyroid cancer, B-cell chronic lymphocytic leukemia, diffuse large B-cell lymphoma (DLBCL), marginal zone lymphoma (MZL), Merkel cell carcinoma, hepatic carcinoma, anal carcinoma, penile carcinoma, testicular cancer, esophageal cancer, tumors of the biliary tract, Ewing's tumor, basal cell carcinoma, adenocarcinoma, sweat gland carcinoma, sebaceous gland carcinoma, papillary carcinoma, papillary adenocarcinomas, cystadenocarcinoma, medullary carcinoma, bronchogenic carcinoma, renal cell carcinoma, hepatoma, bile duct carcinoma, choriocarcinoma, seminoma, embryonal carcinoma, Wilms' tumor, testicular tumor, lung carcinoma, bladder carcinoma, epithelial carcinoma, glioma (e.g., malignant glioma), astrocytoma, medulloblastoma, craniopharyngioma, ependymoma, pinealoma, hemangioblastoma, acoustic neuroma, oligodendroglioma, meningioma, melanoma, neuroblastoma, retinoblastoma, leukemia, lymphoma, multiple myeloma, Waldenstrom's macroglobulinemia, myelodysplastic disease, heavy chain disease, neuroendocrine tumors, Schwannoma, and other carcinomas, as well as head and neck cancer. In some embodiments, the cancer is a neuroendocrine cancer. Furthermore, benign (i.e., noncancerous) hyperproliferative diseases, disorders and conditions, including benign prostatic hypertrophy (BPH), meningioma, schwannoma, neurofibromatosis, keloids, myoma and uterine fibroids and others may also be treated using the disclosure disclosed herein.

[0355] “Administration” refers herein to introducing an agent or composition into a subject.

[0356] “Treating” as used herein refers to delivering an agent or composition to a subject to affect a physiologic outcome. In some embodiments, treating refers to the treatment of a disease in a mammal, e.g., in a human, including (a) inhibiting the disease, i.e., arresting disease development or preventing disease progression; (b) relieving the disease, i.e., causing regression of the disease state; and (c) curing the disease.

[0357] “Population” of cells refers to any number of cells greater than 1, but is preferably at least 1×10³ cells, at least 1×10⁴ cells, at least 1×10⁵ cells, at least 1×10⁶ cells, at least 1×10⁷ cells, at least 1×10⁸ cells, at least 1×10⁹ cells, at least 1×10¹⁰ cells, or more cells. A population of cells may refer to an in vitro population (e.g., a population of cells in culture) or an in vivo population (e.g., a population of cells residing in a particular tissue).

[0358] “Effector function” refers to functions of an immune cell related to the generation, maintenance, and/or enhancement of an immune response against a target cell or target antigen.

[0359] The terms “microRNA,” “miRNA,” and “miR” are used interchangeably herein and refer to small non-coding endogenous RNAs of about 21-25 nucleotides in length that regulate gene expression by directing their target messenger RNAs (mRNA) for degradation or translational repression.

[0360] The term “composition” as used herein refers to a formulation of a recombinant RNA molecule or a particle-encapsulated recombinant RNA molecule described herein that is capable of being administered or delivered to a subject or cell.

[0361] The term “replication-competent viral genome” refers to a viral genome encoding all of the viral genes necessary for viral replication and production of an infectious viral particle.

[0362] The term “oncolytic virus” refers to a virus that has been modified to, or naturally, preferentially infect cancer cells.

[0363] The term “vector” is used herein to refer to a nucleic acid molecule capable of transferring or transporting another nucleic acid molecule.

[0364] The term “replicon” refers to a nucleic acid that is capable of directing the generation of copies of itself. As used herein, the term “replicon” includes RNA as well as DNA. Generally, a viral replicon contains at least a part of the genome of the virus. A viral replicon may contain an incomplete viral genome yet is still capable of directing the generation of copies of itself.

[0365] The term “upstream”, when used in reference to nucleic acid, refers to a nucleotide sequence that is located toward 5′ with respect to the reference nucleotide sequence, and when used in reference to polypeptide, refers to an amino acid sequence that is located towards N-term with respect to the reference amino acid sequence. The term “downstream”, when used in reference to nucleic acid, refers to a nucleotide sequence that is located toward 3′ with respect to the reference nucleotide sequence, and when used in reference to polypeptide, refers to an amino acid sequence that is located towards C-term with respect to the reference amino acid sequence.

[0366] The term “cis-acting replication element” refers to a portion of the RNA genome of an RNA virus or replicon which must be present in cis, that is, present as part of each viral strand as a necessary condition for replication. In some embodiments, the cis-acting replication element is composed of one or more segments of viral RNA.

[0367] The terms “corresponding to” or “correspond to”, as used herein in relation to the amino acid or nucleic acid position(s), refer to the position(s) in a first polypeptide/polynucleotide sequence that aligns with a given amino acid/nucleic acid in a reference polypeptide/polynucleotide sequence when the first and the reference polypeptide/polynucleotide sequences are aligned. Alignment is performed by one of skill in the art using software designed for this purpose, for example, Clustal Omega version 1.2.4 with the default parameters for that version.

[0368] General methods in molecular and cellular biochemistry can be found in such standard textbooks as Molecular Cloning: A Laboratory Manual, 3rd Ed. (Sambrook et al., HaRBor Laboratory Press 2001); Short Protocols in Molecular Biology, 4th Ed. (Ausubel et al. eds., John Wiley & Sons 1999); Protein Methods (Bollag et al., John Wiley & Sons 1996); Nonviral Vectors for Gene Therapy (Wagner et al. eds., Academic Press 1999); Viral Vectors (Kaplift & Loewy eds., Academic Press 1995); Immunology Methods Manual (I. Lefkovits ed., Academic Press 1997); and Cell and Tissue Culture: Laboratory Procedures in Biotechnology (Doyle & Griffiths, John Wiley & Sons 1998), the disclosures of which are incorporated herein by reference.

### FURTHER NUMBERED EMBODIMENTS

[0369] Further numbered embodiments of the present disclosure are provided as follows:

[0370] Embodiment 1. A recombinant RNA replicon comprising:
[0371] a picornavirus genome, wherein the picornavirus genome comprises a deletion or a truncation in one or more protein coding regions; and
[0372] a heterologous polynucleotide.

[0373] Embodiment 2. The recombinant RNA replicon of Embodiment 1, wherein the picornavirus genome comprises the deletion or the truncation in one or more VP coding regions.

[0374] Embodiment 3. The recombinant RNA replicon of Embodiment 1 or 2, wherein the picornavirus genome comprises the deletion or the truncation in each of the VP1, VP3 and VP2 coding regions.

[0375] Embodiment 4. The recombinant RNA replicon of any one of Embodiments 1-3, wherein the picornavirus genome comprises the deletion of the VP1 and VP3 coding regions and the truncation of the VP2 coding region.

[0376] Embodiment 5. The recombinant RNA replicon of any one of Embodiments 1-4, wherein the picornavirus is selected from a senecavirus, a cardiovirus, and an enterovirus.

[0377] Embodiment 6. The recombinant RNA replicon of any one of Embodiments 1-5, wherein the deletion or the truncation comprises at least 500 bp, at least 1000 bp, at least 1500 bp, at least 2000 bp, at least 2500 bp, or at least 3000 bp.

[0378] Embodiment 7. The recombinant RNA replicon of Embodiments 6, wherein the deletion or the truncation comprises at least 2000 bp.

[0379] Embodiment 8. The recombinant RNA replicon of any one of Embodiments 1-7, wherein a site of the deletion or a site of the truncation comprises the heterologous polynucleotide

[0380] Embodiment 9. The recombinant RNA replicon of any one of Embodiments 1-7, wherein the heterologous polynucleotide is inserted between a 2A coding region and a 2B coding region.

[0381] Embodiment 10. The recombinant RNA replicon of any one of Embodiments 1-7, wherein the heterologous polynucleotide is inserted between a 3D coding region and a 3′ untranslated region (UTR).

[0382] Embodiment 11. The recombinant RNA replicon of any one of Embodiments 1-10, wherein the heterologous polynucleotide comprises at least 1000 bp, at least 2000 bp, or at least 3000 bp.

[0383] Embodiment 12. The recombinant RNA replicon of any one of Embodiments 1-11, wherein the picornavirus is a Seneca Valley Virus (SVV).

[0384] Embodiment 13. The recombinant RNA replicon of Embodiment 12, wherein the deletion or the truncation comprises one or more nucleotides between nucleotide 1261 and 3477, inclusive of the endpoints, according to the numbering of SEQ ID NO: 1.

[0385] Embodiment 14. The recombinant RNA replicon of Embodiment 12, wherein the deletion or the truncation comprises nucleotide 1261 to 3477, inclusive of the endpoints, according to the numbering of SEQ ID NO: 1.

[0386] Embodiment 15. The recombinant RNA replicon of Embodiments 12 or 13, wherein the deletion or the truncation comprises at least 500 bp, at least 1000 bp, at least 1500 bp, or at least 2000 bp.

[0387] Embodiment 16. The recombinant RNA replicon of Embodiment 15, wherein the deletion or the truncation comprises at least 2000 bp.

[0388] Embodiment 17. The recombinant RNA replicon of any one of Embodiments 12 to 16, wherein the SVV genome comprises a 5′ leader protein coding sequence.

[0389] Embodiment 18. The recombinant RNA replicon of any one of Embodiments 12 to 17, wherein the SVV genome comprises a VP4 coding region.

[0390] Embodiment 19. The recombinant RNA replicon of any one of Embodiments 12 to 18, wherein the SVV genome comprises a VP2 coding region or a truncation thereof.

[0391] Embodiment 20. The recombinant RNA replicon of Embodiment 19, wherein the SVV genome comprises, from 5′ to 3′ direction, the 5′ leader protein coding sequence, the VP4 coding region, and the VP2 coding region or a truncation thereof.

[0392] Embodiment 21. The recombinant RNA replicon of Embodiment 20, wherein a portion of the SVV genome comprising the 5′ leader protein coding sequence, the VP4 coding region, and the VP2 coding region or a truncation thereof has at least 90% sequence identity to nucleotide 1 to 1260 of SEQ ID NO: 1.

[0393] Embodiment 22. The recombinant RNA replicon of Embodiment 20 or 21, wherein the SVV genome comprises, from 5′ to 3′ direction, the 5′ leader protein coding sequence, the VP4 coding region, the VP2 coding region or a truncation thereof, and the heterologous polynucleotide.

[0394] Embodiment 23. The recombinant RNA replicon of any one of Embodiments 1-22, wherein the SVV genome comprises a cis-acting replication element (CRE).

[0395] Embodiment 24. The recombinant RNA replicon of Embodiment 23, wherein the CRE comprises between 10-200 bp.

[0396] Embodiment 25. The recombinant RNA replicon of Embodiment 23 or 24, wherein the CRE comprises one or more nucleotides within the region corresponding to nucleotide 1000 to nucleotide 1260 according to SEQ ID NO: 1.

[0397] Embodiment 26. The recombinant RNA replicon of Embodiment 23 or 24, wherein the CRE comprises one or more nucleotides within the region corresponding to nucleotide 1117 to nucleotide 1260 according to SEQ ID NO: 1.

[0398] Embodiment 27. The recombinant RNA replicon of any one of Embodiments 23-26, wherein the CRE comprises a polynucleotide sequence having at least 70%, at least 75%, at least 80%, at least 85%, at least 90%, at least 95%, at least 96%, at least 97%, at least 98%, at least 99%, or 100% identity to SEQ ID NO: 149.

[0399] Embodiment 28. The recombinant RNA replicon of any one of Embodiments 12-27, wherein the SVV genome further comprises a 2A coding region.

[0400] Embodiment 29. The recombinant RNA replicon of Embodiment 28, wherein the 2A coding region is located between the VP2 coding region or a truncation thereof and the heterologous polynucleotide.

[0401] Embodiment 30. The recombinant RNA replicon of any one of Embodiments 12-29, wherein the SVV genome comprises one or more of a 2B coding region, a 2C coding region, a 3A coding region, a 3B coding region, a 3Cpro coding region, and a 3D(RdRp) coding region.

[0402] Embodiment 31. The recombinant RNA replicon of any one of Embodiments 12-29, wherein the SVV genome comprises a 2B coding region, a 2C coding region, a 3A coding region, a 3B coding region, a 3Cpro coding region, and a 3D(RdRp) coding region.

[0403] Embodiment 32. The recombinant RNA replicon of Embodiment 31, wherein the SVV genome comprises, from 5′ to 3′, the 2B coding region, the 2C coding region, the 3A coding region, the 3B coding region, the 3Cpro coding region, and the 3D(RdRp) coding region.

[0404] Embodiment 33. The recombinant RNA replicon of Embodiment 32, wherein a portion of the SVV genome comprising the 2B coding region, the 2C coding region, the 3A coding region, the 3B coding region, the 3Cpro coding region, and the 3D(RdRp) coding region has at least 90% sequence identity to nucleotide 3505 to 7310 according to SEQ ID NO: 1.

[0405] Embodiment 34. The recombinant RNA replicon of any one of Embodiments 30-33, wherein the SVV genome comprises, from 5′ to 3′, the heterologous polynucleotide and the 2B coding region.

[0406] Embodiment 35. The recombinant RNA replicon of any one of Embodiments 1 to 11, wherein the picornavirus is a coxsackievirus.

[0407] Embodiment 36. The recombinant RNA replicon of Embodiment 35, wherein the deletion or the truncation comprises one or more nucleotides between nucleotide 717 to 3332, inclusive of the endpoints, according to the numbering of SEQ ID NO: 3.

[0408] Embodiment 37. The recombinant RNA replicon of Embodiment 35, wherein the deletion or the truncation comprises nucleotide 717 to 3332, inclusive of the endpoints, according to the numbering of SEQ ID NO: 3.

[0409] Embodiment 38. The recombinant RNA replicon of Embodiment 35 or 36, wherein the deletion or the truncation comprises at least 500 bp, at least 1000 bp, at least 1500 bp, at least 2000 bp, or at least 2600 bp.

[0410] Embodiment 39. The recombinant RNA replicon of any one of Embodiments 35 to 38, wherein the coxsackievirus genome comprises a 5′ UTR.

[0411] Embodiment 40. The recombinant RNA replicon of any one of Embodiments 35 to 39, wherein a portion of the coxsackievirus genome comprising the 5′ UTR has at least 90% sequence identity to SEQ ID NO: 4.

[0412] Embodiment 41. The recombinant RNA replicon of any one of Embodiments 35 to 40, wherein the coxsackievirus genome comprises one or more of a 2A coding region, a 2B coding region, a 2C coding region, a 3A coding region, a 3B coding region, a VPg coding region, a 3C coding region, a 3D pol coding region, and a 3′ UTR.

[0413] Embodiment 42. The recombinant RNA replicon of any one of Embodiments 35 to 40, wherein the coxsackievirus genome comprises a 2A coding region, a 2B coding region, a 2C coding region, a 3A coding region, a 3B coding region, a VPg coding region, a 3C coding region, a 3D pol coding region, and a 3′ UTR.

[0414] Embodiment 43. The recombinant RNA replicon of Embodiment 42, wherein the coxsackievirus genome comprises, from 5′ to 3′ direction, the 2A coding region, the 2B coding region, the 2C coding region, the 3A coding region, the 3B coding region, the VPg coding region, the 3C coding region, the 3D pol coding region, and the 3′ UTR.

[0415] Embodiment 44. The recombinant RNA replicon of Embodiment 42, wherein a portion of the coxsackievirus genome comprising the 2A coding region, the 2B coding region, the 2C coding region, the 3A coding region, the 3B coding region, the VPg coding region, the 3C coding region, the 3D pol coding region, and the 3′ UTR has at least 90% sequence identity to nucleotide 3492 to 7435 in SEQ ID NO: 3.

[0416] Embodiment 45. The recombinant RNA replicon of any one of Embodiments 41 to 44, wherein the coxsackievirus genome comprises, from 5′ to 3′, the 5′ UTR, the heterologous polynucleotide, and the 2A coding region.

[0417] Embodiment 46. The recombinant RNA replicon of any one of Embodiments 1 to 11, wherein the picornavirus is an encephalomyocarditis virus (EMCV).

[0418] Embodiment 47. The recombinant RNA replicon of any one of Embodiments 9 and 11-46, wherein the recombinant RNA replicon comprises an internal ribosome entry site (IRES) inserted between the heterologous polynucleotide and the 2B coding region.

[0419] Embodiment 48. The recombinant RNA replicon of any one of Embodiments 1 to 47, wherein the heterologous polynucleotide encodes one or more payload molecules.

[0420] Embodiment 49. The recombinant RNA replicon of any one of Embodiments 1 to 47, wherein the heterologous polynucleotide encodes two or more payload molecules.

[0421] Embodiment 50. The recombinant RNA replicon of Embodiment 49, wherein the two or more payload molecules are operably linked by one or more cleavage polypeptides.

[0422] Embodiment 51. The recombinant RNA replicon of Embodiment 50, wherein the cleavage polypeptide comprises a 2A family self-cleaving peptide, a 3C cleavage site, a furin site, an IGSF1 polypeptide, or a HIV protease site.

[0423] Embodiment 52. The recombinant RNA replicon of Embodiment 51, wherein the cleavage polypeptide comprises an IGSF1 polypeptide, and wherein the IGSF1 polypeptide comprises an amino acid sequence having at least 90% identity to SEQ ID NO: 75.

[0424] Embodiment 53. The recombinant RNA replicon of Embodiment 51, wherein the cleavage polypeptide comprises an HIV protease site.

[0425] Embodiment 54. The recombinant RNA replicon of Embodiment 51, wherein the cleavage polypeptide comprises a 2A family self-cleaving peptide.

[0426] Embodiment 55. The recombinant RNA replicon of any one of Embodiments 50 to 54, wherein the cleavage polypeptide comprises a furin site.

[0427] Embodiment 56. The recombinant RNA replicon of any one of Embodiments 50 to 55, wherein the heterologous polynucleotide encodes a polypeptide comprising the two or more payload molecules and the cleavage polypeptide comprising, from N-terminus to C-terminus: N′-payload molecule 1-cleavage polypeptide-payload molecule 2-C′.

[0428] Embodiment 57. The recombinant RNA replicon of Embodiment 53, wherein the heterologous polynucleotide further comprises a coding region that encodes an HIV protease, and wherein the heterologous polynucleotide comprises a coding region that encodes a polypeptide comprising, from N-terminus to C-terminus: N′-Payload molecule 1-HIV protease site-HIV protease-HIV protease site-Payload molecule 2-C′.

[0429] Embodiment 58. The recombinant RNA replicon of Embodiment 57, wherein the heterologous polynucleotide further comprises a coding region that encodes a third payload molecule, and wherein the heterologous polynucleotide comprises a coding region that encodes a polypeptide comprising, from N-terminus to C-terminus:

N′-Payload molecule 1-HIV protease site-HIV protease-HIV protease site-Payload molecule 2-HIV protease site-Payload molecule 3-C′.

[0430] Embodiment 59. The recombinant RNA replicon of any one of Embodiments 56 to 58, further comprising a cleavage polypeptide at the C-terminus of the encoded polypeptide.

[0431] Embodiment 60. The recombinant RNA replicon of any one of Embodiment 48 to 59, wherein the payload molecules are selected from a fluorescent protein, an enzyme, a cytokine, a chemokine, an antigen, an antigen-binding molecule capable of binding to a cell surface receptor, and a ligand for a cell-surface receptor.

[0432] Embodiment 61. The recombinant RNA replicon of any one of Embodiment 48 to 59, wherein the payload molecules are selected from:
[0433] a) one or more cytokines comprising IFN□, GM-CSF, IL-2, IL-12, IL-15, IL-18, IL-23, and IL-36γ;
[0434] b) one or more chemokines comprising CXCL10, CCL4, CCL5, and CCL21;
[0435] c) one or more antibodies comprising an anti-PD1-VHH-Fc antibody, an anti-CD47-VHH-Fc antibody, and an anti-TGFβ-VHH(or scFv)-Fc antibody;
[0436] d) one or more bipartite polypeptides comprising a bipartite polypeptide binding to DLL3 and an effector cell target antigen, a bipartite polypeptide binding to FAP and an effector cell target antigen, and a bipartite polypeptide binding to EpCAM and an effector cell target antigen;
[0437] e) one or more tumor-associated antigens comprising survivin, MAGE family proteins, and all antigens according to Table 6;
[0438] f) one or more tumor neoantigens;
[0439] g) one or more bipartite polypeptides binding to MHC-peptide antigen complex;
[0440] h) one or more fusogenic proteins comprising herpes simplex virus (HSV) UL27/glycoprotein B/gB, HSV UL53/glycoprotein K/gK, Respiratory syncytial virus (RSV) F protein, FASTp15, VSV-G, syncitin-1 (from human endogenous retrovirus-W (HERV-W)) or syncitin-2 (from HERVFRDE1), paramyxovirus SV5-F, measles virus-H, measles virus-F, and the glycoprotein from a retrovirus or lentivirus, such as gibbon ape leukemia virus (GALV), murine leukemia virus (MLV), Mason-Pfizer monkey virus (MPMV) and equine infectious anemia virus (EIAV), optionally with the R transmembrane peptide removed (R-versions);
[0441] i) one or more other payload molecules comprising IL15R, PGDH, ADA, ADA2, HYAL1, HYAL2, CHIPS, MLKL (or its 4HB domain only), GSDMD (or its L192A mutant, or its amino acids 1-233 fragment, or its amino acids 1-233 fragment with L192A mutation), GSDME (or its amino acid 1-237 fragment), HMGB1 (or its Box B domain only), Melittin (e.g., alpha-Melittin), SMAC/Diablo (or its amino acid 56-239 fragment), Snake LAAO, Snake disintegrin, Leptin, FLT3L, TRAIL, Gasdermin D or a truncation thereof, and Gasdermin E or a truncation thereof,
[0442] j) one or more antigens from pathogens comprising Dengue virus, Chikungunya virus, Mycobacterium tuberculosis, Human immunodeficiency viruses, SARS-CoV-2, Coronavirus, Hepatitis B Virus, Togaviridae family virus, Flaviviridae family virus, Influenza A virus, Influenza B virus, and a veterinary virus; or
[0443] k) any combination thereof.

[0444] Embodiment 62. The recombinant RNA replicon of any one of Embodiments 49 to 59, wherein the two or more payload molecules are selected from the group consisting of a fluorescent protein, an enzyme, a cytokine, a chemokine, an antigen-binding molecule capable of binding to a cell surface receptor, and a ligand for a cell-surface receptor.

[0445] Embodiment 63. The recombinant RNA replicon of any one of Embodiments 49 to 59, wherein the heterologous polynucleotide encodes two or more payload molecules comprising:
[0446] a. IL-2 and IL-36γ;
[0447] b. CXCL10 and an antigen binding molecule binding to FAP and CD3;
[0448] c. IL-2 and an antigen binding molecule binding to DLL3 and CD3;
[0449] d. IL-36γ and an antigen binding molecule binding to DLL3 and CD3; or
[0450] e. IL-2, IL-36γ and an antigen binding molecule binding to DLL3 and CD3.

[0451] Embodiment 64. The recombinant RNA replicon of any one of Embodiments 1 to 63, further comprising a microRNA (miRNA) target sequence (miR-TS) cassette comprising one or more miRNA target sequences.

[0452] Embodiment 65. The recombinant RNA replicon of Embodiment 64, wherein the one or more miRNAs comprise miR-124, miR-1, miR-143, miR-128, miR-219, miR-219a, miR-122, miR-204, miR-217, miR-137, and miR-126.

[0453] Embodiment 66. A recombinant DNA molecule comprising, from 5′ to 3′, a promoter sequence, a 5′ junctional cleavage sequence, a polynucleotide sequence encoding the recombinant RNA replicon of any one of Embodiments 1-65, and a 3′ junctional cleavage sequence.

[0454] Embodiment 67. The recombinant DNA molecule of Embodiment 66, wherein the promoter sequence is a T7 promoter sequence.

[0455] Embodiment 68. The recombinant DNA molecule of Embodiment 66 or 67, wherein the 5′ junctional cleavage sequence is a ribozyme sequence and the 3′ junctional cleavage sequence is a ribozyme sequence.

[0456] Embodiment 69. The recombinant DNA molecule of Embodiment 68, wherein the 5′ ribozyme sequence is a hammerhead ribozyme sequence and wherein the 3′ ribozyme sequence is a hepatitis delta virus ribozyme sequence.

[0457] Embodiment 70. The recombinant DNA molecule of Embodiment 66 or 67, wherein the 5′ junctional cleavage sequence is a ribozyme sequence and the 3′ junctional cleavage sequence is a restriction enzyme recognition sequence.

[0458] Embodiment 71. The recombinant DNA molecule of Embodiment 70, wherein the 5′ ribozyme sequence is a hammerhead ribozyme sequence, a Pistol ribozyme sequence, or a modified Pistol ribozyme sequence.

[0459] Embodiment 72. The recombinant DNA molecule of Embodiment 70 or 71, wherein 3′ restriction enzyme recognition sequence is a Type IIS restriction enzyme recognition sequence.

[0460] Embodiment 73. The recombinant DNA molecule of Embodiment 72, wherein the Type IIS recognition sequence is a SapI recognition sequence.

[0461] Embodiment 74. The recombinant DNA molecule of Embodiment 66 or 67, wherein the 5′ junctional cleavage sequence is an RNAseH primer binding sequence and the 3′ junctional cleavage sequence is a restriction enzyme recognition sequence.

[0462] Embodiment 75. A method of producing the recombinant RNA replicon of any one of Embodiments 1-65, comprising in vitro transcription of the DNA molecule of any one of Embodiments 66-74 and purification of the resulting recombinant RNA replicon.

[0463] Embodiment 76. A composition comprising an effective amount of the recombinant RNA replicon of any one of Embodiments 1-65, and a carrier suitable for administration to a mammalian subject.

[0464] Embodiment 77. A vector comprising the recombinant RNA replicon of any one of Embodiments 1-65.

[0465] Embodiment 78. The vector of Embodiment 77, wherein the vector is a viral vector.

[0466] Embodiment 79. The vector of Embodiment 77, wherein the vector is a non-viral vector.

[0467] Embodiment 80. A particle comprising the recombinant RNA replicon of any one of Embodiments 1-65.

[0468] Embodiment 81. The particle of Embodiment 80, wherein the particle is selected from the group consisting of a nanoparticle, an exosome, a liposome, and a lipoplex.

[0469] Embodiment 82. The particle of Embodiment 81, wherein the nanoparticle is a lipid nanoparticle (LNP) comprising a cationic lipid, one or more helper lipids, and a phospholipid-polymer conjugate.

[0470] Embodiment 83. The particle of Embodiment 82, wherein the cationic lipid is selected from DLinDMA, DLin-KC2-DMA, DLin-MC3-DMA (MC3), COATSOME® SS-LC (former name: SS-18/4PE-13), COATSOME® SS-EC (former name: SS-33/4PE-15), COATSOME® SS-OC, COATSOME® SS-OP, Di((Z)-non-2-en-1-yl)9-((4-dimethylamino)butanoyl)oxy)heptadecanedioate (L-319), or N-(2,3-dioleoyloxy)propyl)-N,N,N-trimethylammonium chloride (DOTAP).

[0471] Embodiment 84. The particle of Embodiment 82 or 83, wherein the helper lipid is selected from 1,2-distearoyl-sn-glycero-3-phosphocholine (DSPC); 1,2-dilauroyl-sn-glycero-3-phosphoethanolamine (DLPE); 1,2-dioleoyl-sn-glycero-3-phosphocholine (DOPC); 1,2-dioleoyl-sn-glycero-3-phosphoethanolamine (DOPE); and cholesterol.

[0472] Embodiment 85. The particle of Embodiment 82, wherein the cationic lipid is 1,2-dioleoyl-3-trimethylammonium-propane (DOTAP), and wherein the neutral lipid is 1,2-Dilauroyl-sn-glycero-3-phosphoethanolamine (DLPE) or 1,2-Dioleoyl-sn-glycero-3-phosphoethanolamine (DOPE).

[0473] Embodiment 86. The particle of any one of Embodiments 82-85, wherein the PEG-lipid is selected from 1,2-distearoyl-sn-glycero-3-phosphoethanolamine-N-[amino(polyethyleneglycol)] (DSPE-PEG); 1,2-dipalmitoyl-rac-glycerol methoxypolyethylene glycol (DPG-PEG); 1,2-distearoyl-rac-glycero-3-methylpolyoxyethylene (DSG-PEG); 1,2-distearoyl-rac-glycero-3-methylpolyoxyethylene (DSG-PEG); 1,2-dimyristoyl-rac-glycero-3-methylpolyoxyethylene (DMG-PEG); and 1,2-dimyristoyl-rac-glycero-3-methylpolyoxyethylene (DMG-PEG), or 1,2-distearoyl-sn-glycero-3-phosphoethanolamine-N-[amino(polyethylene glycol)] (DSPE-PEG-amine).

[0474] Embodiment 87. The particle of any one of Embodiments 82-86, wherein the PEG-lipid is selected from 1,2-distearoyl-sn-glycero-3-phosphoethanolamine-N-[amino(polyethyleneglycol)-5000] (DSPE-PEG5K); 1,2-dipalmitoyl-rac-glycerol methoxypolyethylene glycol-2000 (DPG-PEG2K); 1,2-distearoyl-rac-glycero-3-methylpolyoxyethylene-5000 (DSG-PEG5K); 1,2-distearoyl-rac-glycero-3-methylpolyoxyethylene-2000 (DSG-PEG2K); 1,2-dimyristoyl-rac-glycero-3-methylpolyoxyethylene-5000 (DMG-PEG5K); and 1,2-dimyristoyl-rac-glycero-3-methylpolyoxyethylene-2000 (DMG-PEG2K).

[0475] Embodiment 88. The particle of Embodiment 82, wherein the cationic lipid comprises COATSOME® SS-OC, wherein the one or more helper lipids comprise cholesterol (Chol) and DSPC, and wherein the phospholipid-polymer conjugate comprises DPG-PEG2000.

[0476] Embodiment 89. The particle of Embodiment 88, wherein the ratio of SS-OC:DSPC:Chol:DPG-PEG2K (as a percentage of total lipid content) is A:B:C:D, wherein:
[0477] a. A=40%-60%, B=10%-25%, C=20%-30%, and D=0%-3% and wherein A+B+C+D=100%;
[0478] b. A=45%-50%, B=20%-25%, C=25%-30%, and D=0%-1% and wherein A+B+C+D=100%
[0479] c. A=40%-60%, B=10%-30%, C=20%-45%, and D=0%-3% and wherein A+B+C+D=100%;
[0480] d. A=40%-60%, B=10%-30%, C=25%-45%, and D=0%-3% and wherein A+B+C+D=100%;
[0481] e. A=45%-55%, B=10%-20%, C=30%-40%, and D=1%-2% and wherein A+B+C+D=100%;
[0482] f. A=45%-50%, B=10%-15%, C=35%-40%, and D=1%-2% and wherein A+B+C+D=100%;
[0483] g. A=45%-65%, B=5%-20%, C=20%-45%, and D=0%-3% and wherein A+B+C+D=100%;
[0484] h. A=50%-60%, B=5%-15%, C=30%-45%, and D=0%-3% and wherein A+B+C+D=100%;
[0485] i. A=55%-60%, B=5%-15%, C=30%-40%, and D=1%-2% and wherein A+B+C+D=100%;
[0486] j. A=55%-60%, B=5%-10%, C=30%-35%, and D=1%-2% and wherein A+B+C+D=100%.

[0487] Embodiment 90. The particle of Embodiment 88, wherein the ratio of SS-OC:DSPC:Chol:DPG-PEG2K (as a percentage of total lipid content) is:
[0488] a. about 49:22:28.5:0.5;
[0489] b. about 49:11:38.5:1.5; or
[0490] c. about 58:7:33.5:1.5.

[0491] Embodiment 91. The particle of Embodiment 88, wherein the ratio of SS-OC:DSPC:Chol:DPG-PEG2K (as a percentage of total lipid content) is about 49:22:28.5:0.5.

[0492] Embodiment 92. The particle of Embodiment 82, wherein the cationic lipid is 1,2-dioleoyl-3-trimethylammonium-propane (DOTAP), and wherein the neutral lipid is 1,2-Dilauroyl-sn-glycero-3-phosphoethanolamine (DLPE) or 1,2-Dioleoyl-sn-glycero-3-phosphoethanolamine (DOPE).

[0493] Embodiment 93. The particle of Embodiment 82 or 92, further comprising a PEG-lipid, wherein the PEG-lipid is 1, 2-Distearoyl-sn-glycero-3-phosphoethanolamine-Poly(ethylene glycol) (DSPE-PEG) or 1,2-distearoyl-sn-glycero-3-phosphoethanolamine-N-[amino(polyethylene glycol)] (DSPE-PEG-amine).

[0494] Embodiment 94. The particle of any one of Embodiments 80-93, further comprising a second recombinant RNA molecule encoding an oncolytic virus.

[0495] Embodiment 95. The particle of Embodiment 94, wherein the oncolytic virus is a picornavirus.

[0496] Embodiment 96. The particle of Embodiment 95, wherein the picornavirus is selected from a senecavirus, a cardiovirus, and an enterovirus.

[0497] Embodiment 97. The particle of Embodiment 95, wherein the picornavirus is a Seneca Valley Virus (SVV).

[0498] Embodiment 98. The particle of Embodiment 95, wherein the picornavirus is a Coxsackievirus.

[0499] Embodiment 99. The particle of Embodiment 95, wherein the picornavirus is an encephalomyocarditis virus (EMCV).

[0500] Embodiment 100. A therapeutic composition comprising a plurality of lipid nanoparticles according to any one of Embodiments 82-99.

[0501] Embodiment 101. The therapeutic composition of Embodiment 100 wherein the plurality of LNPs have an average size of about 50 nm to about 120 nm.

[0502] Embodiment 102. The therapeutic composition of Embodiment 100 wherein the plurality of LNPs have an average size of about 100 nm.

[0503] Embodiment 103. The therapeutic composition of any one of Embodiments 100-102, wherein the plurality of LNPs have an average zeta-potential of between about 20 mV to about −20 mV, about 10 mV to about −10 mV, about 5 mV to about −5 mV, or about 20 mV to about −40 mV, −50 mV to about-20 mV, about −40 mV to about −20 mV, or about −30 mV to about −20 mV.

[0504] Embodiment 104. The therapeutic composition of Embodiment 103, wherein the plurality of LNPs have an average zeta-potential of about −30 mV, about −31 mV, about-32 mV, about −33 mV, about −34 mV, about −35 mV, about −36 mV, about −37 mV, about −38 mV, about −39 mV, or about −40 mV.

[0505] Embodiment 105. A method of killing a cancerous cell comprising exposing the cancerous cell to the particle of any one of Embodiments 80-97, the vector of any one of Embodiments 77-79, the recombinant RNA replicon of any one of Embodiments 1-65, or compositions thereof.

[0506] Embodiment 106. The method of Embodiment 105, wherein the method is performed in vivo, in vitro, or ex vivo.

[0507] Embodiment 107. A method of treating a cancer in a subject comprising administering to the subject suffering from the cancer an effective amount of the particle of any one of Embodiments 80-97, the vector of any one of Embodiments 77-79, the recombinant RNA replicon of any one of Embodiments 1-65, or compositions thereof.

[0508] Embodiment 108. The method of Embodiment 107, wherein the particle, the recombinant RNA replicon, or composition thereof is administered intravenously, intranasally, as an inhalant, or is injected directly into a tumor.

[0509] Embodiment 109. The method of Embodiment 107 or 108, wherein the particle, the recombinant RNA replicon, or composition thereof is administered to the subject repeatedly.

[0510] Embodiment 110. The method of any of Embodiments 107-109, wherein the subject is a mouse, a rat, a rabbit, a cat, a dog, a horse, a non-human primate, or a human.

[0511] Embodiment 111. The method of any of Embodiments 107-110, wherein the cancer is selected from lung cancer, breast cancer, ovarian cancer, cervical cancer, prostate cancer, testicular cancer, colorectal cancer, colon cancer, pancreatic cancer (e.g., Castration resistant neuroendocrine prostate cancer), liver cancer, gastric cancer, head and neck cancer, thyroid cancer, malignant glioma, glioblastoma, melanoma, B-cell chronic lymphocytic leukemia, diffuse large B-cell lymphoma (DLBCL), sarcoma, a neuroblastoma, a neuroendocrine cancer, a rhabdomyosarcoma, a medulloblastoma, a bladder cancer, marginal zone lymphoma (MZL), Merkel cell carcinoma, and renal cell carcinoma.

[0512] Embodiment 112. The method of Embodiment 111, wherein:
[0513] a. the lung cancer is small cell lung cancer or non-small cell lung cancer;
[0514] b. the liver cancer is hepatocellular carcinoma (HCC); and/or
[0515] c. the prostate cancer is treatment-emergent neuroendocrine prostate cancer.

[0516] Embodiment 113. The method of Embodiments 111, wherein the cancer is a neuroendocrine cancer.

[0517] Embodiment 114. A method of immunizing a subject against a disease, comprising administering to the subject an effective amount of the particle of any one of Embodiments 80-97, the vector of any one of Embodiments 77-79, the recombinant RNA replicon of any one of Embodiments 1-65, or compositions thereof.

[0518] Embodiment 115. The method of Embodiment 114, wherein the particle, the recombinant RNA replicon, or composition thereof is administered intravenously, intramuscularly, intradermally, intranasally, or as an inhalant.

[0519] Embodiment 116. The method of Embodiment 114 or 115, wherein the particle, the recombinant RNA replicon, or composition thereof is administered to the subject repeatedly.

[0520] Embodiment 117. The method of any one of Embodiments 114 to 116, wherein the disease is an infectious disease.

[0521] Embodiment 118. The method of Embodiment 117, wherein the infectious disease is caused by one of the pathogens comprising Dengue virus, Chikungunya virus, Mycobacterium tuberculosis, Human immunodeficiency virus, SARS-CoV-2, Coronavirus, Hepatitis B virus, Togaviridae family virus, Flaviviridae family virus, Influenza A virus, Influenza B virus and a veterinary virus.

[0522] Embodiment 119. A recombinant RNA replicon comprising a picornavirus genome and a heterologous polynucleotide.

[0523] Embodiment 120. The recombinant RNA replicon of Embodiment 119, wherein the heterologous polynucleotide is inserted between a 2A coding region and a 2B coding region.

[0524] Embodiment 121. The recombinant RNA replicon of Embodiment 119, wherein the heterologous polynucleotide is inserted between a 5′ UTR and a 2A coding region.

[0525] Embodiment 122. The recombinant RNA replicon of Embodiment 119, wherein the heterologous polynucleotide is inserted between a 3D coding region and a 3′ UTR.

[0526] Embodiment 123. The recombinant RNA replicon of any one of Embodiments 119-122, wherein the picornavirus is selected from a senecavirus, a cardiovirus, and an enterovirus.

### EXAMPLES

[0527] The following examples are given for the purpose of illustrating various embodiments of the disclosure and are not meant to limit the present disclosure in any fashion. The present examples; along with the methods described herein are presently representative of preferred embodiments; are exemplary; and are not intended as limitations on the scope of the disclosure. Changes therein and other uses which are encompassed within the spirit of the disclosure as defined by the scope of the claims will occur to those skilled in the art.

### Example 1: Insertion of Heterologous Polynucleotide Reduces SVV Viral Replication

[0528] Experiments were performed to assess the ability of viral replication of Seneca Valley Virus (SVV) with heterologous polynucleotides of varying lengths inserted into the viral genome (Table 15). Briefly, NCI-H1299 cells were transfected with 0.015 pmol of plasmid encoding the recombinant SVV viral genome on Day 1. Cells were harvested and supernatant were filtered to collect viruses on Day 4. On Day 5, NCI-H446 cells were infected with the collected viruses and CTG assay was performed to estimate viral replication rate. The results are shown in FIG. 2 and Table 15. Insertion of the heterologous polynucleotides caused reduction of viral replication rate.

TABLE 15
Viral Replication of SVV Comprising
Heterologous Polynucleotides

| | Payload | |
|---|---|---|
| | Size | |
| Construct | (bp) | IC50 |
| BV-SVV-wt | n/a | 8.03E−09 |
| BV-SVV-mCherry | 702 | 1.09E−06 |
| BV-SVV-nLuc | 513 | 2.36E−05 |
| BV-SVV-mCXCL10 | 294 | 8.55E−05 |
| BV-SVV-m_scIL12 | 1629 | 4.43E−01 |
| BV-SVV-mFAP-CD3-BiTE | 1518 | 1.80E+00 |
| BV-SVV-mGMCSF | 423 | 1.90E+00 |

### Example 2: Identification of SVV Cis-Acting Replication Element (CRE) within VP2 Region

[0529] Experiments were performed to assess whether deletions/truncations within the viral genome region encoding one or more VP proteins affect SVV viral replication. SVV derived recombinant RNA replicons comprising an mCherry reporter gene and deletions and/or truncations in the regions encoding VP proteins were generated according to Table 16 and FIG. 3A. Corresponding recombinant RNA replicons were generated via in vitro T7 transcription. NCI-H1299 cells were transfected with the resultant RNA, and mCherry expression were evaluated 24 hours after the transfection. The results showed that deletions between 1599 bp-3478 bp has minimal effect on SVV viral replication, whereas a deletion of the nucleotides between 1116 bp-1599 bp (within the VP2 coding region) greatly reduced SVV viral replication (FIG. 3B). Therefore, a cis-acting replication element (or at least a part of the cis-acting replication element) is present between 1116 bp-1599 bp of SVV viral genome.

TABLE 16
SVV Replicons with Deletion in the VP Coding Region

| | | SEQ ID NO: | | |
|---|---|---|---|---|
| | | (for DNA | | |
| | SEQ ID NO: | vector | | Replicon |
| Replicon | (for Replicon) | templates) | Deletion | Length |
| SVVmCh | 20 | 19 | 0 bp | 8.0 kb |
| Trunc1 | 22 | 21 | 1011 bp | 7.1 kb |
| Trunc4 | 28 | 27 | 1554 bp | 6.5 kb |
| Trunc2 | 24 | 23 | 1795 bp | 6.3 kb |
| Trunc5 | 30 | 29 | 1878 bp | 6.2 kb |
| Trunc6 | 32 | 31 | 2362 bp | 5.7 kb |
| Trunc7 | 34 | 33 | 2812 bp | 5.3 kb |
| Trunc3 | 26 | 25 | 3478 bp | 4.6 kb |

### Example 3: Trunc5 Replicon is Trans-Encapsidated by SVVwt with Minimal Efficacy Loss

[0530] Experiments were performed to assess whether Trunc5 replicon can retain efficacy after trans-encapsidation by wildtype SVV and determine fitness cost to wildtype SVV. Briefly, Trunc5 replicon and/or wildtype SVV viral genome were linearized with NotI restriction enzyme and in vitro transcribed (IVT) with the HiScribe T7 RNA Synthesis Kit (NEB). NCI-H1299 cells were co-transfected with 0.5 or 1 ug of each or both resultant RNA molecules using Lipofectamine RNAiMax (Invitrogen). At 48 hours post transfection the supernatant was collected and filtered through a 0.45 um filter. 100 ul of the filtered supernatant was transferred onto a fresh monolayer of H1299 cells and expression of mCherry was observed at 24 hours post infection (FIG. 4A). Expression of mCherry was detected after co-transfection with SVVwt but not after transfection with replicon alone, demonstrating that Trunc5 was trans-encapsidated. Viral titer from filtered supernatants from SVVwt transfection versus SVVwt and Trunc5-SVV replicon co-transfection were compared using an IC50 assay performed in NCI-H446 cells (FIG. 4B). Co-transfection of SVVwt with Trunc5 results in minimal reduction of viral titer.

### Example 4: Trunc10 Maintains CRE and Maximizes Payload Capacity

[0531] Further experiments were performed to narrow down the location of CRE and analyze the length of tolerable deletion within the SVV VP coding regions. SVV derived recombinant RNA replicons comprising an mCherry reporter gene and deletions and/or truncations in the regions encoding VP proteins were generated according to Table 17 and FIG. 5A. Experiments were performed according to the protocol described in Example 2. FIG. 5B shows the RNA molecules generated via in vitro T7 RNA synthesis, and FIG. 5C shows mCherry signal of various replicon. The results showed that a deletion between 1260 bp-3478 bp (Trunc10 replicon) has minimal impact on SVV viral replication.

TABLE 17
SVV Replicons with Deletion in the VP Coding Region

| | | SEQ ID NO: | | |
|---|---|---|---|---|
| | | (for DNA | | |
| | SEQ ID NO: | vector | | Replicon |
| Replicon | (for Replicon) | templates) | Deletion | Length |
| SVVmCh | 20 | 19 | 0 bp | 8.0 kb |
| Trunc5 | 30 | 29 | 1878 bp | 6.2 kb |
| Trunc6 | 32 | 31 | 2362 bp | 5.7 kb |
| Trunc8 | 36 | 35 | 2071 bp | 6.0 kb |
| Trunc10 | 38 | 37 | 2218 bp | 5.8 kb |

### Example 5: SVV Replicons with Single Payload are Replication and Trans-Encapsidation Competent

[0532] Replicons were constructed for in-vitro and in-vivo testing of competency (FIGS. 6A-6B). Various payloads (mCherry, nano-Luciferase, or eGFP) were inserted into the replicon as shown in FIG. 6B, and the resultant replicons were tested according to protocols in Examples 2-4. The result showed that all these replicons are replication and trans-encapsidation competent.

### Example 6: SVV-Trunc10 Replicon with Murine IL-2 Payload

[0533] Experiments were conducted to test the expression of murine IL-2 payload protein via the SVV-Trunc10 replicon. FIG. 7A shows the construction of SVV-replicon Trunc10 carrying a transgene encoding murine TL-2 payload. The replicon and SVV-mCherry templates were linearized with NotI restriction enzyme and in vitro transcribed (IVT) with the HiScribe T7 RNA Synthesis Kit (NEB). H1299 cells were transfected using Lipofectamine RNAiMax (Invitrogen) with 1 ug of Replicon RNA or 1 ug of Replicon RNA plus 1 ug SVVmCherry. At 48 hours post transfection the supernatant was collected and filtered through a 0.45 um filter and RNA was collected in QIAzol (Qiagen). 100 ul of the filtered supernatant was transferred onto a fresh monolayer of H1299 cells and supernatant was collected at 48 hours post infection. Expression of murine IL-2 was detected with a mIL-2 ELISA (R&D) (FIG. 7B). In addition, viral RNA was isolated and analyzed with a positive and negative strand specific taqman assay (FIG. 7C). The results showed that the SVV-Trunc10-mIL-2 replicon expresses and secretes mIL-2 after transfection and trans-encapsidation, and is competent for positive and negative strand viral RNA synthesis.

### Example 7: SVV-Trunc10 Replicon with Single Chain mIL-12 Payload

[0534] Experiments were conducted to test the expression of single chain mIL-12 (scmIL-12) payload protein via the SVV-Trunc10 replicon. FIG. 8A depicts the construction of SVV-replicon Trunc10 carrying a transgene encoding single chain mIL-12 (scmIL-12), with and without a signal sequence. The replicon and SVV-mCherry templates were linearized with NotI restriction enzyme and in vitro transcribed (IVT) with the HiScribe T7 RNA Synthesis Kit (NEB). H1299 cells were transfected using Lipofectamine RNAiMax (Invitrogen) with 1 ug of Replicon RNA or 1 ug of Replicon RNA plus 1 ug SVVmCherry. At 48 hours post transfection the supernatant was collected and filtered through a 0.45 um filter and RNA was collected in QIAzol (Qiagen). 100 ul of the filtered supernatant was transferred onto a fresh monolayer of H1299 cells and supernatant was collected at 48 hours post infection. RNA was isolated and analyzed with a positive and negative strand specific taqman assay (FIG. 8B), which showed that the replicons are competent for positive and negative strand viral RNA synthesis, and payload secretion is not correlated with positive or negative viral RNA synthesis. Expression of murine IL-12 was detected with a mIL-2 ELISA (R&D) (FIG. 8C), which showed that the Trunc10-scmIL-12 replicon expressed and secreted mIL-12 after transfection and trans-encapsidation. Deletion of the signal sequence reduced IL-12 secretion. Overall, the results showed that the Trunc10-scmIL-12 and Trunc10-scmIL-12Δss replicons are competent for positive and negative strand viral RNA synthesis, however the intact signal sequence facilitates expression and secretion of mIL-12 after transfection and trans-encapsidation.

### Example 8: SVV-Trunc10-hIL-36γ Replicon

[0535] Experiments were conducted to test the expression of human IL-36γ payload protein via the SVV-Trunc10 replicon. FIG. 9A depicts the construction of SVV-replicon Trunc10 carrying a transgene encoding human IL-36γ, with the native signal sequence or with the IL2 signal sequence. The replicon and SVV-mCherry templates were linearized with NotI restriction enzyme and in vitro transcribed (IVT) with the HiScribe T7 RNA Synthesis Kit (NEB). H1299 cells were transfected using Lipofectamine RNAiMax (Invitrogen) with 1 ug of Replicon RNA or 1 ug of Replicon RNA plus 1 ug SVVmCherry. At 48 hours post transfection the supernatant was collected and filtered through a 0.45 um filter and RNA was collected in QIAzol reagent (Qiagen). 100 ul of the filtered supernatant was transferred onto a fresh monolayer of H1299 cells and supernatant was collected at 48 hours post infection. Expression of hIL-36γ was detected with an hIL-36γ ELISA (R&D). Both replicons express and secrete hIL-36γ after transfection and trans-encapsidation, and addition of the IL-2 signal sequence does not improve expression or secretion (FIG. 9B). RNA was isolated and analyzed with a positive and negative strand specific taqman assay. The results (FIG. 9C) showed that both replicons are competent for positive and negative strand viral RNA synthesis. Overall, the results demonstrated that the SVV-Trunc10-hIL-36γ and SVV-Trunc10-IL2ss-hIL-36γ-18S replicons express and secrete hIL-36γ after transfection and trans-encapsidation, and are competent for positive and negative strand viral RNA synthesis.

### Example 9: Second IRES in Dicistronic Replicons does not Improve Replicon Function

[0536] FIG. 10A depicts construction of dicistronic replicons incorporated with a second encephalomyocarditis virus (EMCV) IRES downstream of a single payload. The effect of the second IRES on replicon function improvement were tested. The replicon and SVV-mCherry templates were linearized with NotI restriction enzyme and in vitro transcribed (IVT) with the HiScribe T7 RNA Synthesis Kit (NEB). H1299 cells were transfected using Lipofectamine RNAiMax (Invitrogen) with 1 ug of Replicon RNA or 1 ug SVVmCherry. At 48 hours post transfection RNA was collected with QIAzol (Qiagen). RNA was isolated and analyzed with a positive and negative strand specific taqman assay (FIG. 10B). The results showed that negative strand synthesis of the replicon was impaired by the addition of the second ECMV IRES, and incorporation of a second IRES downstream of the hDLL3-BiTE or mIL-2 payloads did not improve viral RNA synthesis.

### Example 10: Multiple furinT2A Sites are not Effective for Payload Expression in Dicistronic Dual Payload Replicons

[0537] FIG. 11A depicts construction of dicistronic dual payload replicons incorporated with a second encephalomyocarditis virus (EMCV) IRES downstream of multiple payloads separated by a furin-T2A site between the first payload and the second payload (eGFP). The replicon and SVV-mCherry templates were linearized with NotI restriction enzyme and in vitro transcribed (IVT) with the HiScribe T7 RNA Synthesis Kit (NEB). H1299 cells were transfected using Lipofectamine RNAiMax (Invitrogen) with 1 ug of Replicon RNA or 1 ug of replicon RNA plus 1 ug SVVmCherry. At 48 hours post transfection cells were observed for GFP expression and the supernatant from co-transfection of replicon and SVVmCherry was collected and filtered through a 0.45 um filter. 100 ul of the filtered supernatant was transferred onto a fresh monolayer of H1299 cells and cells were examined for mCherry and GFP expression 24 hours post infection (FIG. 11B). Minimal expression of GFP was detected after transfection of either Trunc10-hDLL3-BiTE-GFP-eIRES or Trunc10-mIL2-GFP-eIRES or after trans-encapsidation, indicating that the dicistronic replicon has impaired expression of the second payload.

### Example 11: Dual Payload Replicon with Second Payload Incorporated at the 3′ End of the Replicon is not Efficient for Replication

[0538] FIG. 12A depicts construction of a dual payload replicon incorporated with a second payload at the 3′ end of the replicon between the RdRp and the 3′UTR. The replicon and SVV-mCherry templates were linearized with NotI restriction enzyme and in vitro transcribed (IVT) with the HiScribe T7 RNA Synthesis Kit (NEB). H1299 cells were transfected using Lipofectamine RNAiMax (Invitrogen) with 1 ug of Replicon RNA or 1 ug of Replicon RNA plus 1 ug SVVmCherry. At 48 hours post transfection the supernatant was collected and filtered through a 0.45 um filter and RNA was collected in QIAzol reagent (Qiagen). 100 ul of the filtered supernatant was transferred onto a fresh monolayer of H1299 cells and supernatant was collected at 48 hours post infection. Expression of hIL-36γ was detected with an hIL-36γ ELISA (R&D). The replicon secreted less than 2 pg/mL of hIL-36 after transfection and the hIL-36 secretion was not detectable after trans-encapsidation (FIG. 12B). RNA was isolated and analyzed with a positive and negative strand specific taqman assay, which showed that the replicon was defective for positive and negative strand viral RNA synthesis (FIG. 12C). The results demonstrated that payload insertion at the 3′ end results in very low expression of IL-36γ after transfection, inhibits trans-encapsidation, and reduces positive and negative strand synthesis.

### Example 12: Expression of 1DLT176-MTT10-DLL3-VHH-CD3 Using Trunc10 Replicon

[0539] Single payload replicon for expression of his-tagged 1DLT176-MTT10-DLL3-VHH-CD3 LiTE was constructed. The replicon and SVV-mCherry templates were linearized with NotI restriction enzyme and in vitro transcribed (IVT) with the HiScribe T7 RNA Synthesis Kit (NEB). H1299 cells were transfected using Lipofectamine RNAiMax (Invitrogen) with 1 ug of Replicon RNA or 1 ug of Replicon RNA plus 1 ug SVVmCherry. At 48 hours post transfection the supernatant was collected and filtered through a 0.45 um filter and RNA was collected in QIAzol reagent (Qiagen). 100 ul of the filtered supernatant was transferred onto a fresh monolayer of H1299 cells and supernatant was collected at 48 hours post infection. Expression of his-tagged 1DLT176-MTT10-DLL3-VHH-CD3 LiTE was detected with an anti-His western blot. Specific bands correlated with LiTE expression were indicated with an arrow and detected in supernatant of transfected and trans-encapsidated samples (FIG. 13A). RNA is isolated and analyzed with a positive and negative strand specific taqman assay (FIG. 13B). The results suggested that the Trunc10-1DLT176-MTT10-DLL3-VHH-CD3 replicon is competent for LiTE payload expression, and for positive and negative strand viral RNA synthesis.

### Example 13: Expression of rDLL3-αCD3-H/L-BiTE and T10-rDLL3-αCD3-L/H-BiTE Using Trunc10 Replicon

[0540] Single payload replicons for expression of his-tagged rDLL3-αCD3-BiTE were constructed. The H/L is oriented with heavy chain followed by light chain, while the reverse is true for L/H. A. The replicon and SVV-mCherry templates were linearized with NotI restriction enzyme and in vitro transcribed (IVT) with the HiScribe T7 RNA Synthesis Kit (NEB). H1299 cells were transfected using Lipofectamine RNAiMax (Invitrogen) with 1 ug of Replicon RNA or 1 ug of Replicon RNA plus 1 ug SVVmCherry. At 48 hours post transfection the supernatant was collected and filtered through a 0.45 um filter and RNA was collected in QIAzol reagent (Qiagen). 100 ul of the filtered supernatant was transferred onto a fresh monolayer of H1299 cells and supernatant was collected at 48 hours post infection. Expression of his-tagged rDLL3-αCD3-BiTE was detected with an anti-His western blot (FIG. 14A). Specific bands correlated with LiTE expression is indicated with an arrow and detected in supernatant of transfected and trans-encapsidated samples. RNA was isolated and analyzed with a positive and negative strand specific taqman assay (FIG. 14B). The results demonstrated that both of the Trunc10-rDLL3-αCD3 BiTE expressing replicons are competent for BiTE payload expression, trans-encapsidation, and for positive and negative strand viral RNA synthesis. The orientation of heavy and light chain does not affect replicon function.

### Example 14: Alternate Cleavage Peptides for Expressing Multiple Payloads Using Trunc10 Replicon

[0541] Trunc10 replicon comprising alternate cleavage peptides (3C, or furin-3C, or furinT2A) between his-tagged mFAP and CXCL10 were constructed to test whether any of these alternative cleavage peptides enables efficient expression of multiple payloads from a single replicon (FIG. 15A and SEQ ID NOs: 40, 42, 44). The replicon templates (SEQ ID NOs: 39, 41, 43) and SVV-mCherry templates were linearized with NotI restriction enzyme and in vitro transcribed (IVT) with the HiScribe T7 RNA Synthesis Kit (NEB). H1299 cells were transfected using Lipofectamine RNAiMax (Invitrogen) with 1 ug of Replicon RNA or 1 ug of Replicon RNA plus 1 ug SVVmCherry. At 48 hours post transfection the supernatant was collected and filtered through a 0.45 um filter and RNA was collected in QIAzol reagent (Qiagen). 100 ul of the filtered supernatant was transferred onto a fresh monolayer of H1299 cells and supernatant was collected at 48 hours post infection. Expression of CXCL10 was analyzed with a CXCL10 specific ELISA (R&D). Expression of CXCL10 was not detected after transfection or trans-encapsidation (FIG. 15B). RNA is isolated and analyzed with a positive and negative strand specific taqman assay (FIG. 15C), which showed that all these replicons are deficient for positive and negative strand viral RNA synthesis. Therefore, compared to the original furinT2A site, 3C, fT2A and furin3C cleavage sites do not promote dual payload expression or negative or positive strand synthesis.

[0542] Trunc10 replicon comprising alternate cleavage peptides (T2A, P2A, F2A, or E2A) between his-tagged mFAP and CXCL10 were constructed to test whether any of these alternative cleavage peptides enables efficient expression of multiple payloads from a single replicon (FIG. 16A and SEQ ID NOs: 48, 50, 52, 54). The replicon templates (SEQ ID NOs: 47, 49, 51, 53) and SVV-mCherry template were linearized with NotI restriction enzyme and in vitro transcribed (IVT) with the HiScribe T7 RNA Synthesis Kit (NEB). H1299 cells were transfected using Lipofectamine RNAiMax (Invitrogen) with 1 ug of Replicon RNA or 1 ug of Replicon RNA plus 1 ug SVVmCherry. At 48 hours post transfection the supernatant was collected and filtered through a 0.45 um filter and RNA is collected in QIAzol reagent (Qiagen). 100 ul of the filtered supernatant was transferred onto a fresh monolayer of H1299 cells and supernatant was collected at 48 hours post infection. Expression of CXCL10 was examined with a CXCL10 specific ELISA (R&D) (FIG. 16B), which showed that expression of CXCL10 is enhanced from the T2A, P2A, F2A, and E2A replicons compared to the furin-T2A replicon, but CXCL10 expression is not detected after trans-encapsidation. RNA is isolated and analyzed with a positive and negative strand specific taqman assay (FIG. 16C), which showed that all replicons are competent for positive and negative strand viral RNA synthesis which is improved compared to the furin-T2A replicon.

### Example 15: An IGSF1 Internal Domain Linker with a N Terminal Furin Site Allows Secretion of 2 Polypeptides from a Single ORF

[0543] An IGSF1 internal domain linker with an N terminal furin site was tested as the cleavage polypeptide for expression of multiple payloads from a single replicon. A host IGSF1 mediated processing linker was designed to enable expression and secretion of 2 payloads from the same open reading frame (ORF). The human IGSF1 protein contains a transmembrane domain and a tandem signal sequence/signal peptidase site to facilitate secretion of a second secreted payload. On the N-terminus of the IGSF1 linker a 2× furin cleavage sites were included for ER processing of both peptides and to assure release of the N-terminal payload. In this example the N-terminal payload molecule is murine IL-12 and the C-terminal payload molecule is IL-36γamma within the ORF (FIG. 17A and SEQ ID NO: 60). The ORF was inserted into Trunc10 replicon for test.

[0544] The replicon template (SEQ ID NO: 59) and SVV-mCherry template were linearized with NotI restriction enzyme and in vitro transcribed (IVT) with the HiScribe T7 RNA Synthesis Kit (NEB). H1299 cells were transfected using Lipofectamine RNAiMax (Invitrogen) with 1 ug of Replicon RNA or 1 ug of Replicon RNA plus 1 ug SVVmCherry. At 48 hours post transfection the supernatant was collected and filtered through a 0.45 um filter and RNA was collected in QIAzol reagent (Qiagen). 100 ul of the filtered supernatant was transferred onto a fresh monolayer of H1299 cells and supernatant was collected at 48 hours post infection. Expression of human IL-36γ and murine IL-2 are detected with hIL-36γ and mIL-2 ELISAs (R&D). Expression of both payloads is detected after transfection and trans-encapsidation (TE) (FIGS. 17B-17C). RNA is isolated and analyzed with a positive and negative strand specific taqman assay (FIG. 17D), which showed that all replicons are competent for positive and negative strand viral RNA synthesis and replicate comparably to a single payload GFP replicon. Overall, the results demonstrated a successful strategy of using IGSF1 mediated processing to cleave between IL2 and IL36 which enables expression of both payloads from a single replicon. Both IL36 and IL2 were expressed after transfection and trans-encapsidation. Positive and negative strand RNA synthesis is equivalent to the T10-eGFP replicon.

### Example 16: HIV-Protease-Mediated Proteolysis Enhances Payload Expression of Two Payloads

[0545] FIG. 18A depicts schematic for HIV-1 protease mediated processing of two secreted payloads in the same open reading frame. Two payloads are separated by either a linked dimer or monomer of HIV-1 protease and flanking HIV protease cleavage (PR) sites. In this example the N-terminal payload molecule is murine IL-12 and the C-terminal payload molecule is IL-36γ within the ORF. The ORF was inserted into Trunc10 replicon for test (SEQ ID NOs: 56, 58). The replicon templates (SEQ ID NO: 55, 57) and SVV-mCherry template were linearized with NotI restriction enzyme and in vitro transcribed (IVT) with the HiScribe T7 RNA Synthesis Kit (NEB). H1299 cells were transfected using Lipofectamine RNAiMax (Invitrogen) with 1 μg of Replicon RNA or 1 ug of Replicon RNA plus 1 μg SVVmCherry. At 48 hours post transfection the supernatant was collected and filtered through a 0.45 um filter and RNA is collected in QIAzol reagent (Qiagen). 100 ul of the filtered supernatant is transferred onto a fresh monolayer of H1299 cells and supernatant is collected at 48 hours post infection. RNA was isolated and analyzed with a positive and negative strand specific taqman assay (FIG. 18B), which showed that all replicons were competent for positive and negative strand viral RNA synthesis and replicate comparably to a single payload GFP replicon. Expression of human IL-36γ and murine IL-2 were detected with hIL-36γ and mIL-2 ELISAs (R&D). Expression of both payloads was detected after transfection and trans-encapsidation (FIG. 18C). Overall, these results demonstrated that a single copy of the HIV-protease enables efficient expression of both payloads from a single replicon, and IL-36γ and IL2 were successfully expressed after transfection and trans-encapsidation. Positive and negative strand RNA synthesis is equivalent to the Trunc10-eGFP replicon. Overall, these results demonstrated that HIV-protease enables of dual payloads from a single ORF.

[0546] FIG. 19A depicts a dual payload replicon T10-BiTE-hIL-36γ, which comprises a monomeric HIV-1 protease and flanking protease cleavage sites between his-tagged hDLL3-BiTE and human IL-36γ, which was tested for expression of two payloads from a single Trunc10 based replicon. The replicon and SVV-mCherry templates were linearized with NotI restriction enzyme and in vitro transcribed (IVT) with the HiScribe T7 RNA Synthesis Kit (NEB). H1299 cells were transfected using Lipofectamine RNAiMax (Invitrogen) with 1 μg of Replicon RNA or 1 μg of Replicon RNA plus 1μg SVVmCherry. At 48 hours post transfection the supernatant was collected and filtered through a 0.45 μm filter and RNA was collected in QIAzol reagent (Qiagen). 100 ul of the filtered supernatant was transferred onto a fresh monolayer of H1299 cells and supernatant was collected at 48 hours post infection. Expression of human IL-36γ was examined with hIL-36γ ELISA (R&D). Expression of hIL-36γ was detected after both transfection and trans-encapsidation (FIG. 19B). RNA was isolated and analyzed with a positive and negative strand specific taqman assay (FIG. 19C), which showed that all replicons were competent for positive and negative strand viral RNA synthesis. Overall, these results demonstrated that a single copy of the HIV-protease enables expression hIL-36 from a dual payload replicon after transfection and trans-encapsidation. Positive and negative strand RNA synthesis is reduced compared to the T10-eGFP replicon.

### Example 17: HIV-Protease-Mediated Expression of Triple Payloads from a Single Replicon

[0547] FIG. 20A depicts a triple payload replicon T10-BiTE-IL3g6-IL2, which comprises a monomeric HIV-1 protease and flanking protease cleavage sites between his-tagged hDLL3-BiTE, human IL-36γ, and murine IL-2, which was tested for expression of three payloads from a single replicon Trunc10 (T10). The replicon and SVV-mCherry templates were linearized with NotI restriction enzyme and in vitro transcribed (IVT) with the HiScribe T7 RNA Synthesis Kit (NEB). H1299 cells were transfected using Lipofectamine RNAiMax (Invitrogen) with 1 μg of Replicon RNA or 1 μg of Replicon RNA plus 1 ug SVVmCherry. At 48 hours post transfection the supernatant was collected and filtered through a 0.45 um filter and RNA was collected in QIAzol reagent (Qiagen). 100 μL of the filtered supernatant was transferred onto a fresh monolayer of H1299 cells and supernatant is collected at 48 hours post infection. Expression of human IL-36γ and murine IL-2 were examined with hIL-36γ or mIL-2 specific ELISA (R&D). Expression of hIL-36 was not detected after transfection and trans-encapsidation, and low expression of mIL-2 was detected after transfection and transencapsidation (FIG. 20B). RNA was isolated and analyzed with a positive and negative strand specific taqman assay (FIG. 20C), which showed that all replicons are competent for positive and negative strand viral RNA synthesis, but the ability is reduced compared to the single payload replicon.

[0548] FIG. 21A depicts an alternative design of triple payload replicon T10-mIL2-BiTE-hIL-36γ, which places IL-2 coding region before the other two payload coding regions, and uses a monomeric HIV-1 protease and flanking protease cleavage sites between murine IL-2, his-tagged hDLL3-BiTE, and human IL-36γ. The construct was tested for expression of three payloads from a single replicon following the same protocol as above. Expression of hIL-36 was detected after transfection, but its expression level was reduced after trans-encapsidation (TE). Low expression of mIL-2 was detected after transfection and transencapsidation in the lysate but it was not secreted into the supernatant (FIG. 21B). RNA is isolated and analyzed with a positive and negative strand specific taqman assay (FIG. 21C), which showed that all replicons are competent for positive and negative strand viral RNA synthesis.

[0549] FIG. 22A depicts another design of triple payload replicon T10-mIL2-hIL-36γ-BiTE, which places the hDLL3-BiTE as the last payload, and comprises a monomeric HIV-1 protease and flanking protease cleavage sites between murine IL-2, human IL-36γ, and his-tagged hDLL3-BiTE. The construct was tested for expression of three payloads from a single replicon following the same protocol as above. RNA was isolated and analyzed with a positive and negative strand specific taqman assay (FIG. 22B), which showed that all replicons were competent for positive and negative strand viral RNA synthesis. Expression of hIL-36 and mIL-2 were detected after transfection but not after trans-encapsidation, and higher expression of mIL-2 is detected in the lysate relative to the supernatant (FIG. 22C). Overall, the results showed that from the triple payload replicon T10-mIL2-hIL36-BiTE BiTE, expression of hIL-36 and mIL-2 can be detected in supernatant and lysate at low levels after transfection but not after trans-encapsidation, and positive and negative strand synthesis is slightly lower than T10-eGFP.

### Example 18: In Vivo Studies of Payload Expression Using SVV-Derived RNA Replicon

[0550] Payload expression using SVV-derived replicons was tested in animal models.

[0551] Athymic nude female mice were implanted with NCI-H69 cells (8×10⁶ cells/0.1 mL in a 1:1 mixture of serum-free PBS and Matrigel®) subcutaneously in the right flank. When median tumor size reached approximately 150 mm³ (120-180 mm³ range), mice were cohorted in groups of 3 mice per treatment arm. In one treatment arm, mice were treated with a mixture of lipid nanoparticles (LNPs) that encapsulate either a wildtype SVV RNA viral genome (SVV-WT) or SVV-Trunc10-hIL-36γ RNA replicon (as described in Example 8) via intratumoral administration. In the control arm, mice were treated with a mixture of LNPs that encapsulate the wildtype SVV RNA viral genome and an SVV-negative control RNA (SVV-Neg) via intratumoral administration. Tumor samples were collected after 48 hrs, 72 hrs, and 6 days post dosing, sample tissues were pulverized, and tumor lysate was prepared. IL-36γ expression level was determined by ELISA. The results are shown in FIG. 23A. Expression of human IL-36γ was detected in tumor samples 48 and 72 hrs post dosing.

[0552] In another set of experiments, athymic nude female mice were implanted with NCI-H446 cells (5×10⁶ cells/0.1 mL in a 1:1 mixture of serum-free PBS and Matrigel®) subcutaneously in the right flank. When median tumor size reached approximately 150 mm³ (120-180 mm³ range), mice were cohorted in groups of 3 mice per treatment arm. In one treatment arm, mice were treated with a mixture of lipid nanoparticles (LNPs) that encapsulate a wildtype SVV RNA viral genome (SVV-WT) and an SVV-replicon RNA that encodes human IL-36γ (R-IL36g) via intratumoral administration. In the control arm, mice were treated with a mixture of LNPs that encapsulate the wild type SVV RNA viral genome and an SVV-negative control RNA (SVV-Neg) via intratumoral administration. Tumor samples were collected after 48 hrs, 72 hrs, and 7 days post dosing, sample tissues were pulverized, and tumor lysate was prepared. IL-36γ expression level was determined by ELISA. The results are shown in FIG. 23B. Expression of human IL-36γ was detected in tumor samples 48 and 72 hrs post dosing.

### Example 19: Construction of a Coxsackievirus A21 Replicon and Payload Expression from the Same

[0553] As shown in FIG. 24, a CVA21-Replicon (SEQ ID NO: 62) was created by removing the VP structural proteins (VP1, VP2, VP3) and replacing them with the fluorescent protein mCherry ORF flanked by 2A protease sites. The replicon can be produced using the DNA vector template according to SEQ ID NO: 61.

[0554] The CVA21-Replicon comprising mCherry payload was tested for expression of payload. 1×10\acute{ }5 NCI-H1299 cells in a six well plate were transfected using RNAiMAx reagent with 500 ng GFP mRNA alone (Transfection control), in equal molar ratio with CVA21-WT RNA (Control 2), or in equal molar ratio with CVA21-Replicon RNA (FIG. 25A). The transfection control showed the maximum transfection efficiency of the H1299 cells. Control 2 showed that the GFP signal was partially inhibited by transfection with CVA21-mRNA. The CVA21-Replicon displays mCherry signal throughout matching that of the transfection control showing very efficient transfection and high expression. Therefore, CVA21 Replicon RNA is capable of expressing payload protein in NCI-H1299 cells.

[0555] Next, experiments were performed to determine whether CVA21 mCherry replicons can be trans-encapsidate in the presence of WT CVA21 virus. 1×10\acute{ }5NCI-H1299 cells in a six well plate were transfected using RNAiMAx reagent with 500 ng with CVA21-Replicon RNA alone (Negative control), or with 500 ng CVA21-WT RNA. 48 h post transfection supernatants were collected, spun down, filtered through 45 μM and then 100 μL was used to infect a new 12 well plate well of (1×10\acute{ }5 cells) H1299 cells. Strong infection and mCherry signal was seen in the well infected with the Replicon:WT virus supernatant suggesting successful encapsidation of the mCherry replicon by WT-RNA produced capsids, whereas the negative control which lacks the CVA21-WT shows no mCherry signal (FIG. 25B). Overall, these results demonstrated that CVA21 replicons carrying payload can be successfully trans-encapsidated in the presence of wildtype CVA21 virus.

### Example 20: In Vivo Efficacy of Lipid Nanoparticles Comprising SVV Derived Recombinant RNA Replicons and RNA Molecules Encoding SVV Viral Genome for Lung Cancer Treatment

[0556] Various Seneca Valley virus (SVV) derived recombinant RNA replicons are constructed. These recombinant RNA replicons comprise a heterologous polynucleotide encoding one or more immunomodulatory proteins (e.g., anti-DLL3 Bi-specific T-cell engager (BiTE)). Some of these recombinant RNA replicons further comprise coding regions for one or more cytokines (e.g., IL-2, IL-12, IL-36γ) and/or one or more chemokines (e.g., CCL21, CCL4). Some of the SVV derived RNA replicons comprise coding regions of one or more payload molecules according to the following Table 18:

TABLE 18
Payload Molecules for SVV derived Replicon

| SVV derived Replicon | Payload Molecules |
|---|---|
| Replicon Construct#A1: | anti-DLL3 BiTE, IL-2 |
| Replicon Construct#A2: | anti-DLL3 BiTE, IL-12 |
| Replicon Construct#A3: | anti-DLL3 BiTE, IL-36γ |
| Replicon Construct#A4: | anti-DLL3 BiTE, CCL21 |
| Replicon Construct#A5: | anti-DLL3 BiTE, CCL4 |
| Replicon Construct#A6: | anti-DLL3 BiTE, IL-2, IL-12 |
| Replicon Construct#A7: | anti-DLL3 BiTE, IL-2, IL-36γ |
| Replicon Construct#A8: | anti-DLL3 BiTE, IL-2, CCL21 |
| Replicon Construct#A9: | anti-DLL3 BiTE, IL-2, CCL4 |
| Replicon Construct#A10: | anti-DLL3 BiTE, IL-12, IL-36γ |
| Replicon Construct#A11: | anti-DLL3 BiTE, IL-12, CCL21 |
| Replicon Construct#A12: | anti-DLL3 BiTE, IL-12, CCL4 |
| Replicon Construct#A13: | anti-DLL3 BiTE, IL-36γ, CCL21 |
| Replicon Construct#A14: | anti-DLL3 BiTE, IL-36γ, CCL4 |
| Replicon Construct#A15: | anti-DLL3 BiTE, CCL21, CCL4 |

[0557] For each of the SVV derived replicon, lipid nanoparticles comprising the SVV derived RNA replicon and RNA molecules encoding SVV viral genome are prepared. Animal experiments are conducted to evaluate the efficacy of these lipid nanoparticles to inhibit lung tumor growth in vivo, which is compared to the efficacy of lipid nanoparticles comprising RNA molecules encoding SVV viral genome but without the RNA replicon.

[0558] Briefly, 8-week-old NSG mice are injected with human PBMC on day 1, 2 and 3. On day 10, H1299-DLL3 cells (5×10⁶ cells/0.1 mL in a 1:1 mixture of serum-free PBS and Matrigel®) are implanted subcutaneously in the right flank of PBMC-humanized mice. When median tumor size is approximately 150 mm³ (120-180 mm³ range), mice are cohorted in groups of 8-10 mice per treatment arm. Mice are treated with the LNPs containing RNA molecules encoding SVV viral genome and a particular SVV derived RNA replicon (via intravenous and/or intratumoral administration). In the control group, mice are treated with the LNPs containing RNA molecules encoding SVV viral genome. Tumor volume is measured 2 times a week to assess the efficacy of each treatment arm.

### Example 21: In Vivo Efficacy of Lipid Nanoparticles Comprising CVA21 Derived Recombinant RNA Replicons and RNA Molecules Encoding CVA21viral Genome for Melanoma Treatment

[0559] Various Coxsackievirus A21 (CVA21)-derived recombinant RNA replicons are constructed. These recombinant RNA replicons comprise a heterologous polynucleotide encoding one or more immunomodulatory proteins (e.g., anti-DLL3 Bi-specific T-cell engager (BiTE)). Some of these recombinant RNA replicons further comprise coding regions for one or more cytokines (e.g., IL-2, IL-12, IL-36γ) and/or one or more chemokines (e.g., CCL21, CCL4). Some of the CVA21 derived RNA replicons comprise coding regions of one or more payload molecules according to the following Table 19:

TABLE 19
Payload Molecules for CVA21 derived Replicon

| CVA21 derived Replicon | Payload Molecules |
|---|---|
| Replicon Construct#C1: | anti-DLL3 BiTE, IL-2 |
| Replicon Construct#C2: | anti-DLL3 BiTE, IL-12 |
| Replicon Construct#C3: | anti-DLL3 BiTE, IL-36γ |
| Replicon Construct#C4: | anti-DLL3 BiTE, CCL21 |
| Replicon Construct#C5: | anti-DLL3 BiTE, CCL4 |
| Replicon Construct#C6: | anti-DLL3 BiTE, IL-2, IL-12 |
| Replicon Construct#C7: | anti-DLL3 BiTE, IL-2, IL-36γ |
| Replicon Construct#C8: | anti-DLL3 BiTE, IL-2, CCL21 |
| Replicon Construct#C9: | anti-DLL3 BiTE, IL-2, CCL4 |
| Replicon Construct#C10: | anti-DLL3 BiTE, IL-12, IL-36γ |
| Replicon Construct#C11: | anti-DLL3 BiTE, IL-12, CCL21 |
| Replicon Construct#C12: | anti-DLL3 BiTE, IL-12, CCL4 |
| Replicon Construct#C13: | anti-DLL3 BiTE, IL-36γ, CCL21 |
| Replicon Construct#C14: | anti-DLL3 BiTE, IL-36γ, CCL4 |
| Replicon Construct#C15: | anti-DLL3 BiTE, CCL21, CCL4 |

[0560] For each of the CVA21 derived replicon, lipid nanoparticles comprising the CVA21 derived RNA replicon and RNA molecules encoding CVA21 viral genome are prepared. Animal experiments are conducted to evaluate the efficacy of these lipid nanoparticles to inhibit melanoma tumor growth in vivo, which is compared to the efficacy of lipid nanoparticles comprising RNA molecules encoding CVA21 viral genome but without the RNA replicon.

[0561] Briefly, 8-week-old NSG mice are injected with human PBMC on day 1, 2 and 3. On day 10, SK-MEL-28-EpCAM cells (5×10⁶ cells/0.1 mL in a 1:1 mixture of serum-free PBS and Matrigel®) are implanted subcutaneously in the right flank of PBMC-humanized mice. When median tumor size is approximately 150 mm³ (120-180 mm³ range), mice are cohorted in groups of 8-10 mice per treatment arm. Mice are treated with the LNPs containing RNA molecules encoding CVA21 viral genome and a particular CVA21 derived RNA replicon (via intravenous and/or intratumoral administration). In the control group, mice are treated with the LNPs containing RNA molecules encoding CVA21 viral genome. Tumor volume is measured 2 times a week to assess the efficacy of each treatment arm.

### INCORPORATION BY REFERENCE

[0562] All references, articles, publications, patents, patent publications, and patent applications cited herein are incorporated by reference in their entireties for all purposes. However, mention of any reference, article, publication, patent, patent publication, and patent application cited herein is not, and should not be taken as, an acknowledgment or any form of suggestion that they constitute valid prior art or form part of the common general knowledge in any country in the world.

[0563] While preferred embodiments of the present disclosure have been shown and described herein; it will be obvious to those skilled in the art that such embodiments are provided by way of example only. Numerous variations, changes, and substitutions will now occur to those skilled in the art without departing from the disclosure. It should be understood that various alternatives to the embodiments of the disclosure described herein may be employed in practicing the disclosure. It is intended that the following claims define the scope of the disclosure and that methods and structures within the scope of these claims and their equivalents be covered thereby.

1. A recombinant RNA replicon comprising:
a picornavirus genome, wherein the picornavirus genome comprises a deletion or a truncation in one or more protein coding regions; and
a heterologous polynucleotide.

2. The recombinant RNA replicon of claim 1, wherein the picornavirus genome comprises the deletion or the truncation in one or more VP coding regions.

3. The recombinant RNA replicon of claim 1 or 2, wherein the picornavirus genome comprises the deletion or the truncation in each of the VP1, VP3 and VP2 coding regions.

4. The recombinant RNA replicon of any one of claims 1-3, wherein the picornavirus genome comprises the deletion of the VP1 and VP3 coding regions and the truncation of the VP2 coding region.

5. The recombinant RNA replicon of any one of claims 1-4, wherein the picornavirus is selected from a senecavirus, a cardiovirus, and an enterovirus.

6. The recombinant RNA replicon of any one of claims 1-5, wherein the deletion or the truncation comprises at least 500 bp, at least 1000 bp, at least 1500 bp, at least 2000 bp, at least 2500 bp, or at least 3000 bp.

7. The recombinant RNA replicon of claim 6, wherein the deletion or the truncation comprises at least 2000 bp.

8. The recombinant RNA replicon of any one of claims 1-7, wherein a site of the deletion or a site of the truncation comprises the heterologous polynucleotide

9. The recombinant RNA replicon of any one of claims 1-7, wherein the heterologous polynucleotide is inserted between a 2A coding region and a 2B coding region.

10. The recombinant RNA replicon of any one of claims 1-7, wherein the heterologous polynucleotide is inserted between a 3D coding region and a 3′ untranslated region (UTR).

11. The recombinant RNA replicon of any one of claims 1-10, wherein the heterologous polynucleotide comprises at least 1000 bp, at least 2000 bp, or at least 3000 bp.

12. The recombinant RNA replicon of any one of claims 1-11, wherein the picornavirus is a Seneca Valley Virus (SVV).

13. The recombinant RNA replicon of claim 12, wherein the deletion or the truncation comprises one or more nucleotides between nucleotide 1261 and 3477, inclusive of the endpoints, according to the numbering of SEQ ID NO: 1.

14. The recombinant RNA replicon of claim 12, wherein the deletion or the truncation comprises nucleotide 1261 to 3477, inclusive of the endpoints, according to the numbering of SEQ ID NO: 1.

15. The recombinant RNA replicon of claims 12 or 13, wherein the deletion or the truncation comprises at least 500 bp, at least 1000 bp, at least 1500 bp, or at least 2000 bp.

16. The recombinant RNA replicon of claim 15, wherein the deletion or the truncation comprises at least 2000 bp.

17. The recombinant RNA replicon of any one of claims 12 to 16, wherein the SVV genome comprises a 5′ leader protein coding sequence.

18. The recombinant RNA replicon of any one of claims 12 to 17, wherein the SVV genome comprises a VP4 coding region.

19. The recombinant RNA replicon of any one of claims 12 to 18, wherein the SVV genome comprises a VP2 coding region or a truncation thereof.

20. The recombinant RNA replicon of claim 19, wherein the SVV genome comprises, from 5′ to 3′ direction, the 5′ leader protein coding sequence, the VP4 coding region, and the VP2 coding region or a truncation thereof.

21. The recombinant RNA replicon of claim 20, wherein a portion of the SVV genome comprising the 5′ leader protein coding sequence, the VP4 coding region, and the VP2 coding region or a truncation thereof has at least 90% sequence identity to nucleotide 1 to 1260 of SEQ ID NO: 1.

22. The recombinant RNA replicon of claim 20 or 21, wherein the SVV genome comprises, from 5′ to 3′ direction, the 5′ leader protein coding sequence, the VP4 coding region, the VP2 coding region or a truncation thereof, and the heterologous polynucleotide.

23. The recombinant RNA replicon of any one of claims 1-22, wherein the SVV genome comprises a cis-acting replication element (CRE).

24. The recombinant RNA replicon of claim 23, wherein the CRE comprises between 10-200 bp.

25. The recombinant RNA replicon of claim 23 or 24, wherein the CRE comprises one or more nucleotides within the region corresponding to nucleotide 1000 to nucleotide 1260 according to SEQ ID NO: 1.

26. The recombinant RNA replicon of claim 23 or 24, wherein the CRE comprises one or more nucleotides within the region corresponding to nucleotide 1117 to nucleotide 1260 according to SEQ ID NO: 1.

27. The recombinant RNA replicon of any one of claims 23-26, wherein the CRE comprises a polynucleotide sequence having at least 70%, at least 75%, at least 80%, at least 85%, at least 90%, at least 95%, at least 96%, at least 97%, at least 98%, at least 99%, or 100% identity to SEQ ID NO: 149.

28. The recombinant RNA replicon of any one of claims 12-27, wherein the SVV genome further comprises a 2A coding region.

29. The recombinant RNA replicon of claim 28, wherein the 2A coding region is located between the VP2 coding region or a truncation thereof and the heterologous polynucleotide.

30. The recombinant RNA replicon of any one of claims 12-29, wherein the SVV genome comprises one or more of a 2B coding region, a 2C coding region, a 3A coding region, a 3B coding region, a 3Cpro coding region, and a 3D(RdRp) coding region.

31. The recombinant RNA replicon of any one of claims 12-29, wherein the SVV genome comprises a 2B coding region, a 2C coding region, a 3A coding region, a 3B coding region, a 3Cpro coding region, and a 3D(RdRp) coding region.

32. The recombinant RNA replicon of claim 31, wherein the SVV genome comprises, from 5′ to 3′, the 2B coding region, the 2C coding region, the 3A coding region, the 3B coding region, the 3Cpro coding region, and the 3D(RdRp) coding region.

33. The recombinant RNA replicon of claim 32, wherein a portion of the SVV genome comprising the 2B coding region, the 2C coding region, the 3A coding region, the 3B coding region, the 3Cpro coding region, and the 3D(RdRp) coding region has at least 90% sequence identity to nucleotide 3505 to 7310 according to SEQ ID NO: 1.

34. The recombinant RNA replicon of any one of claims 30-33, wherein the SVV genome comprises, from 5′ to 3′, the heterologous polynucleotide and the 2B coding region.

35. The recombinant RNA replicon of any one of claims 1 to 11, wherein the picornavirus is a coxsackievirus.

36. The recombinant RNA replicon of claim 35, wherein the deletion or the truncation comprises one or more nucleotides between nucleotide 717 to 3332, inclusive of the endpoints, according to the numbering of SEQ ID NO: 3.

37. The recombinant RNA replicon of claim 35, wherein the deletion or the truncation comprises nucleotide 717 to 3332, inclusive of the endpoints, according to the numbering of SEQ ID NO: 3.

38. The recombinant RNA replicon of claim 35 or 36, wherein the deletion or the truncation comprises at least 500 bp, at least 1000 bp, at least 1500 bp, at least 2000 bp, or at least 2600 bp.

39. The recombinant RNA replicon of any one of claims 35 to 38, wherein the coxsackievirus genome comprises a 5′ UTR.

40. The recombinant RNA replicon of any one of claims 35 to 39, wherein a portion of the coxsackievirus genome comprising the 5′ UTR has at least 90% sequence identity to SEQ ID NO: 4.

41. The recombinant RNA replicon of any one of claims 35 to 40, wherein the coxsackievirus genome comprises one or more of a 2A coding region, a 2B coding region, a 2C coding region, a 3A coding region, a 3B coding region, a VPg coding region, a 3C coding region, a 3D pol coding region, and a 3′ UTR.

42. The recombinant RNA replicon of any one of claims 35 to 40, wherein the coxsackievirus genome comprises a 2A coding region, a 2B coding region, a 2C coding region, a 3A coding region, a 3B coding region, a VPg coding region, a 3C coding region, a 3D pol coding region, and a 3′ UTR.

43. The recombinant RNA replicon of claim 42, wherein the coxsackievirus genome comprises, from 5′ to 3′ direction, the 2A coding region, the 2B coding region, the 2C coding region, the 3A coding region, the 3B coding region, the VPg coding region, the 3C coding region, the 3D pol coding region, and the 3′ UTR.

44. The recombinant RNA replicon of claim 42, wherein a portion of the coxsackievirus genome comprising the 2A coding region, the 2B coding region, the 2C coding region, the 3A coding region, the 3B coding region, the VPg coding region, the 3C coding region, the 3D pol coding region, and the 3′ UTR has at least 90% sequence identity to nucleotide 3492 to 7435 in SEQ ID NO: 3.

45. The recombinant RNA replicon of any one of claims 41 to 44, wherein the coxsackievirus genome comprises, from 5′ to 3′, the 5′ UTR, the heterologous polynucleotide, and the 2A coding region.

46. The recombinant RNA replicon of any one of claims 1 to 11, wherein the picornavirus is an encephalomyocarditis virus (EMCV).

47. The recombinant RNA replicon of any one of claims 9 and 11-46, wherein the recombinant RNA replicon comprises an internal ribosome entry site (IRES) inserted between the heterologous polynucleotide and the 2B coding region.

48. The recombinant RNA replicon of any one of claims 1 to 47, wherein the heterologous polynucleotide encodes one or more payload molecules.

49. The recombinant RNA replicon of any one of claims 1 to 47, wherein the heterologous polynucleotide encodes two or more payload molecules.

50. The recombinant RNA replicon of claim 49, wherein the two or more payload molecules are operably linked by one or more cleavage polypeptides.

51. The recombinant RNA replicon of claim 50, wherein the cleavage polypeptide comprises a 2A family self-cleaving peptide, a 3C cleavage site, a furin site, an IGSF1 polypeptide, or a HIV protease site.

52. The recombinant RNA replicon of claim 51, wherein the cleavage polypeptide comprises an IGSF1 polypeptide, and wherein the IGSF1 polypeptide comprises an amino acid sequence having at least 90% identity to SEQ ID NO: 75.

53. The recombinant RNA replicon of claim 51, wherein the cleavage polypeptide comprises an HIV protease site.

54. The recombinant RNA replicon of claim 51, wherein the cleavage polypeptide comprises a 2A family self-cleaving peptide.

55. The recombinant RNA replicon of any one of claims 50 to 54, wherein the cleavage polypeptide comprises a furin site.

56. The recombinant RNA replicon of any one of claims 50 to 55, wherein the heterologous polynucleotide encodes a polypeptide comprising the two or more payload molecules and the cleavage polypeptide comprising, from N-terminus to C-terminus: N′-payload molecule 1-cleavage polypeptide-payload molecule 2-C′.

57. The recombinant RNA replicon of claim 53, wherein the heterologous polynucleotide further comprises a coding region that encodes an HIV protease, and wherein the heterologous polynucleotide comprises a coding region that encodes a polypeptide comprising, from N-terminus to C-terminus: N′-Payload molecule 1-HIV protease site-HIV protease-HIV protease site-Payload molecule 2-C′.

58. The recombinant RNA replicon of claim 57, wherein the heterologous polynucleotide further comprises a coding region that encodes a third payload molecule, and wherein the heterologous polynucleotide comprises a coding region that encodes a polypeptide comprising, from N-terminus to C-terminus:
N′-Payload molecule 1-HIV protease site-HIV protease-HIV protease site-Payload molecule 2-HIV protease site-Payload molecule 3-C′.

59. The recombinant RNA replicon of any one of claims 56 to 58, further comprising a cleavage polypeptide at the C-terminus of the encoded polypeptide.

60. The recombinant RNA replicon of any one of claim 48 to 59, wherein the payload molecules are selected from a fluorescent protein, an enzyme, a cytokine, a chemokine, an antigen, an antigen-binding molecule capable of binding to a cell surface receptor, and a ligand for a cell-surface receptor.

61. The recombinant RNA replicon of any one of claim 48 to 59, wherein the payload molecules are selected from:
a) one or more cytokines comprising IFNγ, GM-CSF, IL-2, IL-12, IL-15, IL-18, IL-23, and IL-36γ;
b) one or more chemokines comprising CXCL10, CCL4, CCL5, and CCL21;
c) one or more antibodies comprising an anti-PD1-VHH-Fc antibody, an anti-CD47-VHH-Fc antibody, and an anti-TGFβ-VHH(or scFv)-Fc antibody;
d) one or more bipartite polypeptides comprising a bipartite polypeptide binding to DLL3 and an effector cell target antigen, a bipartite polypeptide binding to FAP and an effector cell target antigen, and a bipartite polypeptide binding to EpCAM and an effector cell target antigen;
e) one or more tumor-associated antigens comprising survivin, MAGE family proteins, and all antigens according to Table 6;
f) one or more tumor neoantigens;
g) one or more bipartite polypeptides binding to MHC-peptide antigen complex;
h) one or more fusogenic proteins comprising herpes simplex virus (HSV) UL27/glycoprotein B/gB, HSV UL53/glycoprotein K/gK, Respiratory syncytial virus (RSV) F protein, FASTp15, VSV-G, syncitin-1 (from human endogenous retrovirus-W (HERV-W)) or syncitin-2 (from HERVFRDE1), paramyxovirus SV5-F, measles virus-H, measles virus-F, and the glycoprotein from a retrovirus or lentivirus, such as gibbon ape leukemia virus (GALV), murine leukemia virus (MLV), Mason-Pfizer monkey virus (MPMV) and equine infectious anemia virus (EIAV), optionally with the R transmembrane peptide removed (R-versions);
i) one or more other payload molecules comprising IL15R, PGDH, ADA, ADA2, HYAL1, HYAL2, CHIPS, MLKL (or its 4HB domain only), GSDMD (or its L192A mutant, or its amino acids 1-233 fragment, or its amino acids 1-233 fragment with L192A mutation), GSDME (or its amino acid 1-237 fragment), HMGB1 (or its Box B domain only), Melittin (e.g., alpha-Melittin), SMAC/Diablo (or its amino acid 56-239 fragment), Snake LAAO, Snake disintegrin, Leptin, FLT3L, TRAIL, Gasdermin D or a truncation thereof, and Gasdermin E or a truncation thereof;
j) one or more antigens from pathogens comprising Dengue virus, Chikungunya virus, Mycobacterium tuberculosis, Human immunodeficiency viruses, SARS-CoV-2, Coronavirus, Hepatitis B Virus, Togaviridae family virus, Flaviviridae family virus, Influenza A virus, Influenza B virus, and a veterinary virus; or
k) any combination thereof.

62. The recombinant RNA replicon of any one of claims 49 to 59, wherein the two or more payload molecules are selected from the group consisting of a fluorescent protein, an enzyme, a cytokine, a chemokine, an antigen-binding molecule capable of binding to a cell surface receptor, and a ligand for a cell-surface receptor.

63. The recombinant RNA replicon of any one of claims 49 to 59, wherein the heterologous polynucleotide encodes two or more payload molecules comprising:
a. IL-2 and IL-36γ;
b. CXCL10 and an antigen binding molecule binding to FAP and CD3;
c. IL-2 and an antigen binding molecule binding to DLL3 and CD3;
d. IL-36γ and an antigen binding molecule binding to DLL3 and CD3; or
e. IL-2, IL-36γ and an antigen binding molecule binding to DLL3 and CD3.

64. The recombinant RNA replicon of any one of claims 1 to 63, further comprising a microRNA (miRNA) target sequence (miR-TS) cassette comprising one or more miRNA target sequences.

65. The recombinant RNA replicon of claim 64, wherein the one or more miRNAs comprise miR-124, miR-1, miR-143, miR-128, miR-219, miR-219a, miR-122, miR-204, miR-217, miR-137, and miR-126.

66. A recombinant DNA molecule comprising, from 5′ to 3′, a promoter sequence, a 5′ junctional cleavage sequence, a polynucleotide sequence encoding the recombinant RNA replicon of any one of claims 1-65, and a 3′ junctional cleavage sequence.

67. The recombinant DNA molecule of claim 66, wherein the promoter sequence is a T7 promoter sequence.

68. The recombinant DNA molecule of claim 66 or 67, wherein the 5′ junctional cleavage sequence is a ribozyme sequence and the 3′ junctional cleavage sequence is a ribozyme sequence.

69. The recombinant DNA molecule of claim 68, wherein the 5′ ribozyme sequence is a hammerhead ribozyme sequence and wherein the 3′ ribozyme sequence is a hepatitis delta virus ribozyme sequence.

70. The recombinant DNA molecule of claim 66 or 67, wherein the 5′ junctional cleavage sequence is a ribozyme sequence and the 3′ junctional cleavage sequence is a restriction enzyme recognition sequence.

71. The recombinant DNA molecule of claim 70, wherein the 5′ ribozyme sequence is a hammerhead ribozyme sequence, a Pistol ribozyme sequence, or a modified Pistol ribozyme sequence.

72. The recombinant DNA molecule of claim 70 or 71, wherein 3′ restriction enzyme recognition sequence is a Type IIS restriction enzyme recognition sequence.

73. The recombinant DNA molecule of claim 72, wherein the Type IIS recognition sequence is a SapI recognition sequence.

74. The recombinant DNA molecule of claim 66 or 67, wherein the 5′ junctional cleavage sequence is an RNAseH primer binding sequence and the 3′ junctional cleavage sequence is a restriction enzyme recognition sequence.

75. A method of producing the recombinant RNA replicon of any one of claims 1-65, comprising in vitro transcription of the DNA molecule of any one of claims 66-74 and purification of the resulting recombinant RNA replicon.

76. A composition comprising an effective amount of the recombinant RNA replicon of any one of claims 1-65, and a carrier suitable for administration to a mammalian subject.

77. A vector comprising the recombinant RNA replicon of any one of claims 1-65.

78. The vector of claim 77, wherein the vector is a viral vector.

79. The vector of claim 77, wherein the vector is a non-viral vector.

80. A particle comprising the recombinant RNA replicon of any one of claims 1-65.

81. The particle of claim 80, wherein the particle is selected from the group consisting of a nanoparticle, an exosome, a liposome, and a lipoplex.

82. The particle of claim 81, wherein the nanoparticle is a lipid nanoparticle (LNP) comprising a cationic lipid, one or more helper lipids, and a phospholipid-polymer conjugate.

83. The particle of claim 82, wherein the cationic lipid is selected from DLinDMA, DLin-KC2-DMA, DLin-MC3-DMA (MC3), COATSOME® SS-LC (former name: SS-18/4PE-13), COATSOME® SS-EC (former name: SS-33/4PE-15), COATSOME® SS-OC, COATSOME® SS-OP, Di((Z)-non-2-en-1-yl)9-((4-dimethylamino)butanoyl)oxy)heptadecanedioate (L-319), or N-(2,3-dioleoyloxy)propyl)-N,N,N-trimethylammonium chloride (DOTAP).

84. The particle of claim 82 or 83, wherein the helper lipid is selected from 1,2-distearoyl-sn-glycero-3-phosphocholine (DSPC); 1,2-dilauroyl-sn-glycero-3-phosphoethanolamine (DLPE); 1,2-dioleoyl-sn-glycero-3-phosphocholine (DOPC); 1,2-dioleoyl-sn-glycero-3-phosphoethanolamine (DOPE); and cholesterol.

85. The particle of claim 82, wherein the cationic lipid is 1,2-dioleoyl-3-trimethylammonium-propane (DOTAP), and wherein the neutral lipid is 1,2-Dilauroyl-sn-glycero-3-phosphoethanolamine (DLPE) or 1,2-Dioleoyl-sn-glycero-3-phosphoethanolamine (DOPE).

86. The particle of any one of claims 82-85, wherein the PEG-lipid is selected from 1,2-distearoyl-sn-glycero-3-phosphoethanolamine-N-[amino(polyethyleneglycol)] (DSPE-PEG); 1,2-dipalmitoyl-rac-glycerol methoxypolyethylene glycol (DPG-PEG); 1,2-distearoyl-rac-glycero-3-methylpolyoxyethylene (DSG-PEG); 1,2-distearoyl-rac-glycero-3-methylpolyoxyethylene (DSG-PEG); 1,2-dimyristoyl-rac-glycero-3-methylpolyoxyethylene (DMG-PEG); and 1,2-dimyristoyl-rac-glycero-3-methylpolyoxyethylene (DMG-PEG), or 1,2-distearoyl-sn-glycero-3-phosphoethanolamine-N-[amino(polyethylene glycol)] (DSPE-PEG-amine).

87. The particle of any one of claims 82-86, wherein the PEG-lipid is selected from 1,2-distearoyl-sn-glycero-3-phosphoethanolamine-N-[amino(polyethyleneglycol)-5000] (DSPE-PEG5K); 1,2-dipalmitoyl-rac-glycerol methoxypolyethylene glycol-2000 (DPG-PEG2K); 1,2-distearoyl-rac-glycero-3-methylpolyoxyethylene-5000 (DSG-PEG5K); 1,2-distearoyl-rac-glycero-3-methylpolyoxyethylene-2000 (DSG-PEG2K); 1,2-dimyristoyl-rac-glycero-3-methylpolyoxyethylene-5000 (DMG-PEG5K); and 1,2-dimyristoyl-rac-glycero-3-methylpolyoxyethylene-2000 (DMG-PEG2K).

88. The particle of claim 82, wherein the cationic lipid comprises COATSOME® SS-OC, wherein the one or more helper lipids comprise cholesterol (Chol) and DSPC, and wherein the phospholipid-polymer conjugate comprises DPG-PEG2000.

89. The particle of claim 88, wherein the ratio of SS-OC:DSPC:Chol:DPG-PEG2K (as a percentage of total lipid content) is A:B:C:D, wherein:
a. A=40%-60%, B=10%-25%, C=20%-30%, and D=0%-3% and wherein A+B+C+D=100%;
b. A=45%-50%, B=20%-25%, C=25%-30%, and D=0%-1% and wherein A+B+C+D=100%
c. A=40%-60%, B=10%-30%, C=20%-45%, and D=0%-3% and wherein A+B+C+D=100%;
d. A=40%-60%, B=10%-30%, C=25%-45%, and D=0%-3% and wherein A+B+C+D=100%;
e. A=45%-55%, B=10%-20%, C=30%-40%, and D=1%-2% and wherein A+B+C+D=100%;
f. A=45%-50%, B=10%-15%, C=35%-40%, and D=1%-2% and wherein A+B+C+D=100%;
g. A=45%-65%, B=5%-20%, C=20%-45%, and D=0%-3% and wherein A+B+C+D=100%;
h. A=50%-60%, B=5%-15%, C=30%-45%, and D=0%-3% and wherein A+B+C+D=100%;
i. A=55%-60%, B=5%-15%, C=30%-40%, and D=1%-2% and wherein A+B+C+D=100%;
j. A=55%-60%, B=5%-10%, C=30%-35%, and D=1%-2% and wherein A+B+C+D=100%.

90. The particle of claim 88, wherein the ratio of SS-OC:DSPC:Chol:DPG-PEG2K (as a percentage of total lipid content) is:
a. about 49:22:28.5:0.5;
b. about 49:11:38.5:1.5; or
c. about 58:7:33.5:1.5.

91. The particle of claim 88, wherein the ratio of SS-OC:DSPC:Chol:DPG-PEG2K (as a percentage of total lipid content) is about 49:22:28.5:0.5.

92. The particle of claim 82, wherein the cationic lipid is 1,2-dioleoyl-3-trimethylammonium-propane (DOTAP), and wherein the neutral lipid is 1,2-Dilauroyl-sn-glycero-3-phosphoethanolamine (DLPE) or 1,2-Dioleoyl-sn-glycero-3-phosphoethanolamine (DOPE).

93. The particle of claim 82 or 92, further comprising a PEG-lipid, wherein the PEG-lipid is 1, 2-Distearoyl-sn-glycero-3-phosphoethanolamine-Poly(ethylene glycol) (DSPE-PEG) or 1,2-distearoyl-sn-glycero-3-phosphoethanolamine-N-[amino(polyethylene glycol)] (DSPE-PEG-amine).

94. The particle of any one of claims 80-93, further comprising a second recombinant RNA molecule encoding an oncolytic virus.

95. The particle of claim 94, wherein the oncolytic virus is a picornavirus.

96. The particle of claim 95, wherein the picornavirus is selected from a senecavirus, a cardiovirus, and an enterovirus.

97. The particle of claim 95, wherein the picornavirus is a Seneca Valley Virus (SVV).

98. The particle of claim 95, wherein the picornavirus is a Coxsackievirus.

99. The particle of claim 95, wherein the picornavirus is an encephalomyocarditis virus (EMCV).

100. A therapeutic composition comprising a plurality of lipid nanoparticles according to any one of claims 82-99.

101. The therapeutic composition of claim 100 wherein the plurality of LNPs have an average size of about 50 nm to about 120 nm.

102. The therapeutic composition of claim 100 wherein the plurality of LNPs have an average size of about 100 nm.

103. The therapeutic composition of any one of claims 100-102, wherein the plurality of LNPs have an average zeta-potential of between about 20 mV to about −20 mV, about 10 mV to about −10 mV, about 5 mV to about −5 mV, or about 20 mV to about −40 mV, −50 mV to about −20 mV, about −40 mV to about −20 mV, or about −30 mV to about −20 mV.

104. The therapeutic composition of claim 103, wherein the plurality of LNPs have an average zeta-potential of about −30 mV, about −31 mV, about −32 mV, about −33 mV, about −34 mV, about −35 mV, about −36 mV, about −37 mV, about −38 mV, about −39 mV, or about −40 mV.

105. A method of killing a cancerous cell comprising exposing the cancerous cell to the particle of any one of claims 80-97, the vector of any one of claims 77-79, the recombinant RNA replicon of any one of claims 1-65, or compositions thereof.

106. The method of claim 105, wherein the method is performed in vivo, in vitro, or ex vivo.

107. A method of treating a cancer in a subject comprising administering to the subject suffering from the cancer an effective amount of the particle of any one of claims 80-97, the vector of any one of claims 77-79, the recombinant RNA replicon of any one of claims 1-65, or compositions thereof.

108. The method of claim 107, wherein the particle, the recombinant RNA replicon, or composition thereof is administered intravenously, intranasally, as an inhalant, or is injected directly into a tumor.

109. The method of claim 107 or 108, wherein the particle, the recombinant RNA replicon, or composition thereof is administered to the subject repeatedly.

110. The method of any of claims 107-109, wherein the subject is a mouse, a rat, a rabbit, a cat, a dog, a horse, a non-human primate, or a human.

111. The method of any of claims 107-110, wherein the cancer is selected from lung cancer, breast cancer, ovarian cancer, cervical cancer, prostate cancer, testicular cancer, colorectal cancer, colon cancer, pancreatic cancer (e.g., Castration resistant neuroendocrine prostate cancer), liver cancer, gastric cancer, head and neck cancer, thyroid cancer, malignant glioma, glioblastoma, melanoma, B-cell chronic lymphocytic leukemia, diffuse large B-cell lymphoma (DLBCL), sarcoma, a neuroblastoma, a neuroendocrine cancer, a rhabdomyosarcoma, a medulloblastoma, a bladder cancer, marginal zone lymphoma (MZL), Merkel cell carcinoma, and renal cell carcinoma.

112. The method of claim 111, wherein:
a. the lung cancer is small cell lung cancer or non-small cell lung cancer;
b. the liver cancer is hepatocellular carcinoma (HCC); and/or
c. the prostate cancer is treatment-emergent neuroendocrine prostate cancer.

113. The method of claim 111, wherein the cancer is a neuroendocrine cancer.

114. A method of immunizing a subject against a disease, comprising administering to the subject an effective amount of the particle of any one of claims 80-97, the vector of any one of claims 77-79, the recombinant RNA replicon of any one of claims 1-65, or compositions thereof.

115. The method of claim 114, wherein the particle, the recombinant RNA replicon, or composition thereof is administered intravenously, intramuscularly, intradermally, intranasally, or as an inhalant.

116. The method of claim 114 or 115, wherein the particle, the recombinant RNA replicon, or composition thereof is administered to the subject repeatedly.

117. The method of any one of claims 114 to 116, wherein the disease is an infectious disease.

118. The method of claim 117, wherein the infectious disease is caused by one of the pathogens comprising Dengue virus, Chikungunya virus, Mycobacterium tuberculosis, Human immunodeficiency virus, SARS-CoV-2, Coronavirus, Hepatitis B virus, Togaviridae family virus, Flaviviridae family virus, Influenza A virus, Influenza B virus and a veterinary virus.

119. A recombinant RNA replicon comprising a picornavirus genome and a heterologous polynucleotide.

120. The recombinant RNA replicon of claim 119, wherein the heterologous polynucleotide is inserted between a 2A coding region and a 2B coding region.

121. The recombinant RNA replicon of claim 119, wherein the heterologous polynucleotide is inserted between a 5′ UTR and a 2A coding region.

122. The recombinant RNA replicon of claim 119, wherein the heterologous polynucleotide is inserted between a 3D coding region and a 3′ UTR.

123. The recombinant RNA replicon of any one of claims 119-122, wherein the picornavirus is selected from a senecavirus, a cardiovirus, and an enterovirus.

The application's sequence listing, which the Patent Office published only in electronic form, follows.

SEQUENCE LISTING (149 sequences)

SEQ ID NO: 1 - RNA, 7310 nt, Senecavirus Seneca Valley virus
uuugaaauggggggcugggcccugaugcccaguccuuccuuuccccuuccgggggguuaaccggcuguguuugcuagaggcacagaggggcaacauccaaccugcuuuugcggggaacggugcggcuccgauuccugcgucgccaaagguguuagcgcacccaaacggcgcaccuaccaauguuauugguguggucugcgaguucuagccuacucguuucucccccgaccauucacucacccacgaaaaguguguuguaaccauaagauuuaacccccgcacgggaugugcgauaaccguaagacuggcucaagcgcggaaagcgcuguaaccacaugcuguuagucccuuuauggcugcaagauggcuacccaccucggaucacugaacuggagcucgacccuccuuaguaagggaaccgagaggccuucgugcaacaagcuccgacacagaguccacgugacugcuaccaccaugaguacaugguucuccccucucgacccaggacuucuuuuugaauauccacggcucgauccagaggguggggcaugaccccuagcauagcgagcuacagcgggaacuguagcuaggccuuagcgugccuuggauacugccugauagggcgacggccuagucgugucgguucuauagguagcacauacaaauaugcagaacucucauuuuucuuucgauacagccucuggcaccuuugaagauguaaccggaacaaaagucaagaucguugaauaccccagaucggugaacaaugguguuuacgauucgucuacucauuuggagauacugaaccuacagggugaaauugaaauuuuaaggucuuucaaugaauaccaaauucgcgccgccaaacaacaacucggacuggacaucguguacgaacuacaggguaauguucagacaacgucaaagaaugauuuugauucccguggcaauaaugguaacaugaccuucaauuacuacgcaaacacuuaucagaauucaguagacuucucgaccuccucgucggcgucaggcgccggaccugggaacucucggggcggauuagcgggucuccucacaaauuucaguggaaucuugaacccucuuggcuaccucaaagaucacaacaccgaagaaauggaaaacucugcugaucgagucacaacgcaaacggcgggcaacacugccauaaacacgcaaucaucauuggguguguugugugccuacguugaagacccgaccaaaucugauccuccguccagcagcacagaucaacccaccaccacuuucacugccaucgacaggugguacacuggacgucucaauucuuggacaaaagcuguaaaaaccuucucuuuucaggccgucccgcuucccggugccuuucugucuaggcagggaggccucaacggaggggccuucacagcuacccuacauagacacuuuuugaugaagugcggguggcaggugcagguccaauguaauuugacacaauuccaccaaggcgcucuucuuguugccaugguuccugaaaccacccuugaugucaagcccgacgguaaggcaaagagcuuacaggagcugaaugaagaacaguggguggaaaugucugacgauuaccggaccgggaaaaacaugccuuuucagucucuuggcacauacuaucggcccccuaacuggacuuggggucccaauuucaucaaccccuaucaaguaacgguuuucccacaccaaauucugaacgcgagaaccucuaccucgguagacauaaacgucccauacaucggggagacccccacgcaauccucagagacacagaacuccuggacccuccucguuauggugcucguuccccuagacuauaaggaaggagccacaacugacccagaaauuacauuuucuguaaggccuacaagucccuacuucaaugggcuucgcaaccgcuacacggccgggacggacgaagaacaggggcccauuccuacggcacccagagaaaauucgcuuauguuucucucaacccucccugacgacacugucccugcuuacgggaaugugcguaccccuccugucaauuaccucccuggugaaauaaccgaccuuuugcaacuggcccgcauacccacucucauggcauuugagcgggugccugaacccgugccugccucagacacauaugugcccuacguugccguucccacccaguucgaugacaggccucucaucuccuucccgaucacccuuucagaucccgucuaucagaacacccugguuggcgccaucaguucaaauuucgccaauuaccguggguguauccaaaucacucugacauuuuguggacccaugauggcgagagggaaauuccugcucucguauucucccccaaauggaacgcaaccacagacucuuuccgaagcuaugcagugcacauacucuauuugggacauaggcuugaacucuaguuggaccuucgucguccccuacaucucgcccagugacuaccgugaaacucgagccauuaccaacucgguuuacuccgcugaugguugguuuagccugcacaaguugaccaaaauuacucuaccaccugacuguccgcaaagucccugcauucucuuuuucgcuucugcuggugaggauuacacucuccgucuccccguugauuguaauccuuccuauguguuccacuccaccgacaacgccgagaccgggguuauugaggcggguaacacugacaccgauuucucuggugaacuggcggcuccuggcucuaaccacacuaaugucaaguuccuguuugaucgaucucgauuauugaauguaaucaagguacuggagaaggacgccguuuucccccgcccuuucccuacacaagaaggugcgcagcaggaugaugguuacuuuugucuucugaccccccgcccaacagucgcuucccgacccgccacucguuucggccuguacgccaauccguccggcagugguguucuugcuaacacuucacuggacuucaauuuuuauagcuuggccuguuucacuuacuuuagaucggaccuugagguuacgguggucucacuagagccggaucuggaauuugcuguagggugguuuccuucuggcagugaauaccaggcuuccagcuuugucuacgaccagcugcaugugcccuuccacuuuacugggcgcacuccccgcgcuuucgcuagcaagggugggaagguaucuuucgugcucccuuggaacucugucucgucugugcuccccgugcgcugggggggggcuuccaagcucucuucugcuacgcggggucuaccggcgcaugcugauugggggacuauuuacgccuuugucccccguccuaaugagaagaaaagcaccgcuguaaaacacguggccguguacauucgguacaagaacgcacgugccuggugccccagcaugcuucccuuucgcagcuacaagcagaagaugcugaugcaaucuggcgauaucgagaccaaucccgggccugcuucugacaacccaauuuuggaguuucuugaagcagaaaaugaucuagucacucuggccucucucuggaagauggugcacucuguucaacagaccuggagaaaguaugugaagaacgaugauuuuuggcccaauuuacucagcgagcuagugggggaaggcucugucgccuuggccgccacgcuauccaaccaagcuucaguaaaggcucuuuugggccugcacuuucucucucgggggcucaauuacacugacuuuuacucuuuacugauagagaaaugcucuaguuucuuuaccguagaaccaccuccuccaccagcugaaaaccugaugaccaagcccucagugaagucgaaauuccgaaaacuguuuaagaugcaaggacccauggacaaagucaaagacuggaaccaaauagcugccggcuugaagaauuuucaauuuguucgugaccuagucaaagagguggucgauuggcugcaggccuggaucaacaaagagaaagccagcccuguccuccaguaccaguuggagaugaagaagcucgggccuguggccuuggcucaugacgcuuucauggcugguuccgggcccccucuuagcgacgaccagauugaauaccuccagaaccucaaaucucuugcccuaacacuggggaagacuaauuuggcccaaagucucaccacuaugaucaaugccaaacaaaguucagcccaacgaguugaacccguuguggugguccuuagaggcaagccgggaugcggcaagagcuuggccucuacguugauugcccaggcuguguccaagcgccucuauggcucccaaaguguauauucucuucccccagauccagauuucuucgauggauacaaaggacaguucgugaccuugauggaugauuugggacaaaacccggauggacaagauuucuccaccuuuugucagauggugucgaccgcccaauuucuccccaacauggcggaccuugcagagaaagggcgucccuuuaccuccaaucucaucauugcaacuacaaaucucccccacuucaguccugucaccauugcugauccuucugcagucucucgccguaucaacuacgaucugacucuagaaguaucugaggccuacaagaaacacacacggcugaauuuugacuuggcuuucaggcgcacagacgccccccccauuuauccuuuugcugcccaugugcccuuuguggacguagcugugcgcuucaaaaauggucaccagaauuuuaaucuccuagaguuggucgauuccauuuguacagacauucgagccaagcaacaaggugcccgaaacaugcagacucugguucuacagagccccaacgagaaugaugacacccccgucgacgaggcguuggguagaguucucucccccgcugcggucgaugaggcgcuugucgaccucacuccagaggccgacccgguuggccguuuggcuauucuugccaagcuaggucuugcccuagcugcggucaccccuggucugauaaucuuggcagugggacucuacagguacuucucuggcucugaugcagaccaagaagaaacagaaagugagggaucugucaaggcacccaggagcgaaaaugcuuaugacggcccgaagaaaaacucuaagcccccuggagcacucucucucauggaaaugcaacagcccaacguggacaugggcuuugaggcugcggucgcuaagaaaguggucguccccauuaccuucaugguucccaacagaccuucugggcuuacacaguccgcucuucuggugaccggccggaccuuccuaaucaaugaacauacaugguccaaucccuccuggaccagcuucacaauccgcggugagguacacacucgugaugagcccuuccaaacgguucauuucacucaccacgguauucccacagaucugaugaugguacgucucggaccgggcaauucuuucccuaacaaucuagacaaguuuggacuugaccagaugccggcacgcaacucccgugugguuggcguuucguccaguuacggaaacuucuucuucucuggaaauuuccucggauuuguugauuccaucaccucugaacaaggaacuuacgcaagacucuuuagguacagggugacgaccuacaaaggauggugcggcucggcccuggucugugaggccgguggcguccgacgcaucauuggccugcauucugcuggcgccgccgguaucggcgccgggaccuauaucucaaaauuaggacuaaucaaagcccugaaacaccucggugaaccuuuggccacaaugcaaggacugaugacugaauuagagccuggaaucaccguacauguaccccggaaauccaaauugagaaagacgaccgcacacgcgguguacaaaccggaguuugagccugcuguguugucaaaauuugaucccagacugaacaaggauguugacuuggaugaaguaauuuggucuaaacacacugccaaugucccuuaccaaccuccuuuguucuacacauacaugucagaguacgcucaucgagucuucuccuucuuggggaaagacaaugacauucugaccgucaaagaagcaauucugggcauccccggacuagaccccauggauccccacacagcuccgggucugccuuacgccaucaacggccuucgacguacugaucucgucgauuuugugaacgguacaguagaugcggcgcuggcuguacaaauccagaaauucuuagacggugacuacucugaccaugucuuccaaacuuuucugaaagaugagaucagacccucagagaaaguccgagcgggaaaaacccgcauuguugaugugcccucccuggcgcauugcauugugggcagaauguugcuugggcgcuuugcugccaaguuucaaucccauccuggcuuucuccucggcucugcuaucgggucugacccugauguuuucuggaccgucauaggggcucaacucgaggggagaaagaacacguaugacguggacuacagugccuuugacucuucacacggcacuggcuccuucgaggcucucaucucucacuuuuucaccguggacaaugguuuuagcccugcgcugggaccguaucucagaucccuggcugucucggugcacgcuuacggcgagcgucgcaucaagauuaccgguggccuccccuccgguugugccgcgaccagccugcugaacacagugcucaacaaugugaucaucaggacugcucuggcauugacuuacaaggaauuugaauaugacaugguugauaucaucgccuacggugacgaccuucugguuggcacggauuacgaucuggacuucaaugagguggcacgacgcgcugccaaguugggguauaagaugacuccugccaacaaggguucugucuucccuccgacuuccucucuuuccgaugcuguuuuucuaaagcgcaaauucguccaaaacaacgacggcuuauacaaaccaguuauggauuuaaagaauuuggaagccaugcucuccuacuucaaaccaggaacacuacucgagaagcugcaaucuguuucuauguuggcucaacauucuggaaaagaagaauaugauagauugaugcaccccuucgcugacuacggugccguaccgagucacgaguaccugcaggcaagauggagggccuuguucgacugacccagauagcccaaggcgcuucggugcugccggcgauucugggagaacucagucggaacagaaaagggaaaaaaaaaaaaaaaaaaaaaaaaaaaaaa

SEQ ID NO: 2 - RNA, 7312 nt, Artificial Sequence
  Senecavirus A IR2 mutant
uuugaaauggggggcugggcccugaugcccaguccuuccuuuccccuuccgggggguuaaccggcuguguuugcuagaggcacagaggagcaacauccaaccugcuuuuguggggaacggugcggcuccaauuccugcgucgccaaagguguuagcgcacccaaacggcgcaucuaccaaugcuauugguguggucugcgaguucuagccuacucguuucuccccuauucauucacucacgcacaaaaaguguguuguaacuacaagauuuagcccucacacgggaugugugauaaccgcaagacugacucaagcgcggaaagcgcuguaaccgcaugcuguuagucccuuuauggcugcgagauggcuauccaccucggaucacugaacuggagcucgacccuccuuaguaagggaaccgagaggccuucuugcaacaagcuccgacacagaguccacgugauugcuaccaccaugaguacaugguucuccccucucgacccaggacuucuuuuugaauauccacggcucgauccagaggguggggcaugaucccccuagcauagcgagcuacagcgggaacuguagcuaggccuuagcgugccuuggauacugccugauagggcgacggccuagucgugucgguucuauagguagcacauacaaauaugcagaacucucauuuuucuuucgauacagccucuggcaccuuugaagauguaaccggaacaaaagucaagaucguugaauaccccagaucggugaacaaugguguuuacgauucgucuacucauuuggagauacugaaccuacagggugaaauugaaauuuuaaggucuuucaaugaauaccaaauucgcgccgccaaacaacaacucggacuggacaucguguacgaacuacaggguaauguucagacaacgucaaagaaugauuuugauucccguggcaauaaugguaacaugaccuucaauuacuacgcaaacacuuaucagaauucaguagacuucucgaccuccucgucggcgucaggcgccggaccugggaacucucggggcggauuagcgggucuccucacaaauuucaguggaaucuugaacccucuuggcuaccucaaagaucacaacaccgaagaaauggaaaacucugcugaucgagucacaacgcaaacggcgggcaacacugccauaaacacgcaaucaucauuggguguguugugugccuacguugaagacccgaccaaaucugauccuccguccagcagcacagaucaacccaccaccacuuucacugccaucgacaggugguacacuggacgucucaauucuuggacaaaagcuguaaaaaccuucucuuuucaggccgucccgcuucccggugccuuucugucuaggcagggaggccucaacggaggggccuucacagcuacccuacauagacacuuuuugaugaagugcggguggcaggugcagguccaauguaauuugacacaauuccaccaaggcgcucuccuuguugccaugguuccugaaaccacccuugaugucaagcccgacgguaaggcaaagagcuuacaggagcugaaugaagaacaguggguggaaaugucugacgauuaccggaccgggaaaaacaugccuuuucagucucuuggcacauacuaucggcccccuaacuggacuuggggucccaauuucaucaaccccuaucaaguaacgguuuucccacaccaaauucugaacgcgagaaccucuaccucgguagacauaaacgucccauacaucggggagacccccacgcaauccucagagacacagaacuccuggacccuccucguuauggugcucguuccccuagacuauaaggaaggagccacaacugacccagaaauuacauuuucuguaaggccuacaagucccuacuucaaugggcuucgcaaccgcuacacggccgggacggacgaagaacaggggcccauuccuacggcacccagagaaaauucgcuuauguuucucucaacccucccugacgacacugucccugcuuacgggaaugugcguaccccuccugucaauuaccucccuggugaaauaaccgaccuuuugcaacuggcccgcauacccacucucauggcauuugagcgggugccugaacccgugccugccucagacacauaugugcccuacguugccguucccacccaguucgaugacaggccucucaucuccuucccgaucacccuuucagaucccgucuaucagaacacccugguuggcgccaucaguucaaauuucgccaauuaccguggguguauccaaaucacucugacauuuuguggacccaugauggcgagagggaaauuccugcucucguauucucccccaaauggaacgcaaccacagacucuuuccgaagcuaugcagugcacauacucuauuugggacauaggcuugaacucuaguuggaccuucgucguccccuacaucucgcccagugacuaccgugaaacucgagccauuaccaacucgguuuacuccgcugaugguugguuuagccugcacaaguugaccaaaauuacucuaccaccugacuguccgcaaagucccugcauucucuuuuucgcuucugcuggugaggauuacacucuccgucuccccguugauuguaauccuuccuauguguuccacuccaccgacaacgccgagaccgggguuauugaggcggguaacacugacaccgauuucucuggugaacuggcggcuccuggcucuaaccacacuaaugucaaguuccuguuugaucgaucucgauuauugaauguaaucaagguacuggagaaggacgccguuuucccccgcccuuucccuacacaagaaggugcgcagcaggaugaugguuacuuuugucuucugaccccccgcccaacagucgcuucccgacccgccacucguuucggccuguacgccaauccguccggcagugguguucuugcuaacacuucacuggacuucaauuuuuauagcuuggccuguuucacuuacuuuagaucggaccuugagguuacgguggucucacuagagccggaucuggaauuugcuguagggugguuuccuucuggcagugaauaccaggcuuccagcuuugucuacgaccagcugcaugugcccuuccacuuuacugggcgcacuccccgcgcuuucgcuagcaagggugggaagguaucuuucgugcucccuuggaacucugucucgucugugcuccccgugcgcugggggggggcuuccaagcucucuucugcuacgcggggucuaccggcgcaugcugauugggggacuauuuacgccuuugucccccguccuaaugagaagaaaagcaccgcuguaaaacacguggccguguacauucgguacaagaacgcacgugccuggugccccagcaugcuucccuuucgcagcuacaagcagaagaugcugaugcaaucuggcgauaucgagaccaaucccgggccugcuucugacaacccaauuuuggaguuucuugaagcagaaaaugaucuagucacucuggccucucucuggaagauggugcacucuguucaacagaccuggagaaaguaugugaagaacgaugauuuuuggcccaauuuacucagcgagcuagugggggaaggcucugucgccuuggccgccacgcuauccaaccaagcuucaguaaaggcucuuuugggccugcacuuucucucucgggggcucaauuacacugacuuuuacucuuuacugauagagaaaugcucuaguuucuuuaccguagaaccaccuccuccaccagcugaaaaccugaugaccaagcccucagugaagucgaaauuccgaaaacuguuuaagaugcaaggacccauggacaaagucaaagacuggaaccaaauagcugccggcuugaagaauuuucaauuuguucgugaccuagucaaagagguggucgauuggcugcaggccuggaucaacaaagagaaagccagcccuguccuccaguaccaguuggagaugaagaagcucgggccuguggccuuggcucaugacgcuuucauggcugguuccgggcccccucuuagcgacgaccagauugaauaccuccagaaccucaaaucucuugcccuaacacuggggaagacuaauuuggcccaaagucucaccacuaugaucaaugccaaacaaaguucagcccaacgaguugaacccguuguggugguccuuagaggcaagccgggaugcggcaagagcuuggccucuacguugauugcccaggcuguguccaagcgccucuauggcucccaaaguguauauucucuucccccagauccagauuucuucgauggauacaaaggacaguucgugaccuugauggaugauuugggacaaaacccggauggacaagauuucuccaccuuuugucagauggugucgaccgcccaauuucuccccaacauggcggaccuugcagagaaagggcgucccuuuaccuccaaucucaucauugcaacuacaaaucucccccacuucaguccugucaccauugcugauccuucugcagucucucgccguaucaacuacgaucugacucuagaaguaucugaggccuacaagaaacacacacggcugaauuuugacuuggcuuucaggcgcacagacgccccccccauuuauccuuuugcugcccaugugcccuuuguggacguagcugugcgcuucaaaaauggucaccagaauuuuaaucuccuagaguuggucgauuccauuuguacagacauucgagccaagcaacaaggugcccgaaacaugcagacucugguucuacagagccccaacgagaaugaugacacccccgucgacgaggcguuggguagaguucucucccccgcugcggucgaugaggcgcuugucgaccucacuccagaggccgacccgguuggccguuuggcuauucuugccaagcuaggucuugcccuagcugcggucaccccuggucugauaaucuuggcagugggacucuacagguacuucucuggcucugaugcagaccaagaagaaacagaaagugagggaucugucaaggcacccaggagcgaaaaugcuuaugacggcccgaagaaaaacucuaagcccccuggagcacucucucucauggaaaugcaacagcccaacguggacaugggcuuugaggcugcggucgcuaagaaaguggucguccccauuaccuucaugguucccaacagaccuucugggcuuacacaguccgcucuccuggugaccggccggaccuuccuaaucaaugaacauacaugguccaaucccuccuggaccagcuucacaauccgcggugagguacacacucgugaugagcccuuccaaacgguucauuucacucaccacgguauucccacagaucugaugaugguacgucucggaccgggcaauucuuucccuaacaaucuagacaaguuuggacuugaccagaugccggcacgcaacucccgugugguuggcguuucguccaguuacggaaacuucuucuucucuggaaauuuccucggauuuguugauuccaucaccucugaacaaggaacuuacgcaagacucuuuagguacagggugacgaccuacaaaggauggugcggcucggcccuggucugugaggccgguggcguccgacgcaucauuggccugcauucugcuggcgccgccgguaucggcgccgggaccuauaucucaaaauuaggacuaaucaaagcccugaaacaccucggugaaccuuuggccacaaugcaaggacugaugacugaauuagagccuggaaucaccguacauguaccccggaaauccaaauugagaaagacgaccgcacacgcgguguacaaaccggaguuugagccugcuguguugucaaaauuugaucccagacugaacaaggauguugacuuggaugaaguaauuuggucuaaacacacugccaaugucccuuaccaaccuccuuuguucuacacauacaugucagaguacgcucaucgagucuucuccuucuuggggaaagacaaugacauucugaccgucaaagaagcaauucugggcauccccggacuagaccccauggauccccacacagcuccgggucugccuuacgccaucaacggccuucgacguacugaucucgucgauuuugugaacgguacaguagaugcggcgcuggcuguacaaauccagaaauucuuagacggugacuacucugaccaugucuuccaaacuuuucugaaagaugagaucagacccucagagaaaguccgagcgggaaaaacccgcauuguugaugugcccucccuggcgcauugcauugugggcagaauguugcuugggcgcuuugcugccaaguuucaaucccauccuggcuuucuccucggcucugcuaucgggucugacccugauguuuucuggaccgucauaggggcucaacucgaggggagaaagaacacguaugacguggacuacagugccuuugacucuucacacggcacuggcuccuucgaggcucucaucucucacuuuuucaccguggacaaugguuuuagcccugcgcugggaccguaucucagaucccuggcugucucggugcacgcuuacggcgagcgucgcaucaagauuaccgguggccuccccuccgguugugccgcgaccagccugcugaacacagugcucaacaaugugaucaucaggacugcucuggcauugacuuacaaggaauuugaauaugacaugguugauaucaucgccuacggugacgaccuucugguuggcacggauuacgaucuggacuucaaugagguggcacgacgcgcugccaaguugggguauaagaugacuccugccaacaaggguucugucuucccuccgacuuccucucuuuccgaugcuguuuuucuaaagcgcaaauucguccaaaacaacgacggcuuauacaaaccaguuauggauuuaaagaauuuggaagccaugcucuccuacuucaaaccaggaacacuacucgagaagcugcaaucuguuucuauguuggcucaacauucuggaaaagaagaauaugauagauugaugcaccccuucgcugacuacggugccguaccgagucacgaguaccugcaggcaagauggagggccuuguucgacugacccagauagcccaaggcgcuucggugcugccggcgauucugggagaacucagucggaacagaaaagggaaaaaaaaaaaaaaaaaaaaaaaaaaaaaa

SEQ ID NO: 3 - DNA, 7435 bp, Artificial Sequence
  Modified Coxsackievirus CVA21
ttaaaacagctctggggttgttcccaccccagaggcccacgtggcggctagtactctggtattacggtacctttgtacgcctgttttgtatcccttcccccgtaactttagaagcttatcaaaagttcaatagcaggggtacaaaccagtacctctacgaacaagcacttctgtttccccggtgatatcacatagactgtacccacggtcaaaagtgattgatccgttatccgcttgagtacttcgagaagcctagtatcaccttggaatcttcgatgcgttgcgctcaacactctgccccgagtgtagcttaggctgatgagtctgggcactccccaccggcgacggtggcccaggctgcgttggcggcctacccatggctgatgccgtgggacgctagttgtgaacaaggtgtgaagagcctattgagctactcaagagtcctccggcccctgaatgcggctaatcctaaccacggagcaaccgctcacaacccagtgagtaggttgtcgtaatgcgtaagtctgtggcggaaccgactactttgggtgtccgtgtttccctttatattcatactggctgcttatggtgacaatttacaaattgttaccatatagctattggattggccacccagtattgtgcaatatatttgagtgtttctttcataagccttattaacatcacatttttaatcacaataaacagtgcaaatgggggctcaagtttcaacgcaaaagaccggtgcgcacgagaatcaaaacgtggcagccaatggatccaccattaattacactactatcaactattacaaagacagtgcgagtaattccgctactagacaagacctctcccaagatccatcaaaattcacagaaccggttaaggacttaatgttgaaaacagcaccagctctaaactcgcctaacgtggaagcatgtgggtacagtgaccgtgtgaggcaaatcactttaggcaactcgactattactacacaagaagcagccaatgctattgttgcttacggtgaatggcccacttacataaatgattcagaagctaatccggtagatgcacccactgagccagacgttagtagcaaccggttttacaccctagaatcggtgtcttggaagaccacttcaaggggatggtggtggaagttaccagattgtttgaaggacatgggaatgtttggtcagaatatgtactatcactacttggggcgctctggttacaccattcatgtccagtgcaacgcttcaaaatttcaccaaggggcgttaggagtttttctgataccagagtttgtcatggcttgcaacactgagagtaaaacgtcatacgtttcatacatcaatgcaaatcctggtgagagaggcggtgagtttacgaacacctacaatccgtcaaatacagacgccagtgagggcagaaagtttgcagcattggattatttgctgggttctggtgttctagcaggaaacgcctttgtgtacccgcaccagatcatcaacctacgtaccaacaacagtgcaacaattgtggtgccatacgtaaactcacttgtgattgattgtatggcaaaacacaataactggggcattgtcatattaccactggcacccttggcctttgccgcaacatcgtcaccacaggtgcctattacagtgaccattgcacccatgtgtacagaattcaatgggttgagaaacatcaccgtcccagtacatcaagggttgccgacaatgaacacacctggttccaatcaattccttacatctgatgacttccagtcgccctgtgccttacctaattttgatgttactccaccaatacacatacccggggaagtaaagaatatgatggaactagctgaaattgacacattgatcccaatgaacgcagtggacgggaaggtgaacacaatggagatgtatcaaataccattgaatgacaatttgagcaaggcacctatattctgtttatccctatcacctgcttctgataaacgactgagccgcaccatgttgggtgaaatcctaaattattacacccattggacggggtccatcaggttcacctttctattttgtggtagtatgatggccactggtaaactgctcctcagctattccccaccgggagctaaaccaccaaccaatcgcaaggatgcaatgctaggcacacacatcatctgggacctagggttacaatccagttgttccatggttgcaccgtggatctccaacacagtgtacagacggtgtgcacgtgatgacttcactgagggcggatttataacttgcttctatcaaactagaattgtggtacctgcttcaacccctaccagtatgttcatgttaggctttgttagtgcgtgtccagacttcagtgtcagactgcttagggacactccccatattagtcaatcgaaactaataggacgtacacaaggcattgaagacctcattgacacagcgataaagaatgccttaagagtgtcccaaccaccctcgacccagtcaactgaagcaactagtggagtgaatagccaggaggtgccagctctaactgctgtggaaacaggagcatctggtcaagcaatccccagtgatgtggtggaaactaggcacgtggtaaattacaaaaccaggtctgaatcgtgtcttgagtcattctttgggagagctgcgtgtgtcacaatcctatccttgaccaactcctccaagagcggagaggagaaaaagcatttcaacatatggaatattacatacaccgacactgtccagttacgcagaaaattagagtttttcacgtattccaggtttgatcttgaaatgacttttgtattcacagagaactatcctagtacagccagtggagaagtgcgaaaccaggtgtaccagatcatgtatattccaccaggggcaccccgcccatcatcctgggatgactacacatggcaatcctcttcaaacccttccatcttctacatgtatggaaatgcacctccacggatgtcaattccttacgtagggattgccaatgcctattcacacttctacgatggctttgcacgggtgccacttgagggtgagaacaccgatgctggcgacacgttttacggtttagtgtccataaatgattttggagttttagcagttagagcagtaaaccgcagtaatccacatacaatacacacatctgtgagagtgtacatgaaaccaaaacacattcggtgttggtgccccagacctcctcgagctgtattatacaggggagagggagtggacatgatatccagtgcaattctacctctgaccaaggtagactcaattaccacttttgggtttggtcatcagaacaaagcagtgtacgttgccggttacaagatttgcaactaccacctagcaaccccaagtgatcacttgaatgcaattagtatgttatgggacagggatttaatggtggtggaatctagagcccagggaactgataccatcgccagatgtagttgcaggtgtggagtttactattgtgaatctaggaggaagtactaccctgtcacttttactggcccaacgtttcgattcatggaagcaaacgactactatccagcaagataccagtctcacatgctgatagggtgcggatttgcagaacccggggactgcggtgggatactgaggtgcactcatggggtaattggtatcattactgcaggaggtgaaggggtagtagcctttgctgacattagagacctctgggtgtatgaagaggaggccatggaacagggaataacaagctacatcgaatctctcggcacagcctttggcgcagggttcacccacacaatcagtgagaaagtgactgaattgacaacaatggttaccagcactatcacagaaaaactactgaaaaacttggtgaaaatagtgtcggctctagtgattgttgtgagaaattatgaggacactaccacgatccttgcaacactagcactactcgggtgtgatatatctccttggcaatggttgaagaagaaggcatgtgacttactagagattccttatgtgatgcgccaaggtgatgggtggatgaagaaattcacagaggcgtgcaatgcagctaaaggcttagagtggattagcaacaaaatttccaagtttatagattggttgaagtgtaaaattatcccagacgctaaggacaaggtggaatttctcaccaagttgaaacagctagacatgttggaaaatcaaattgcaaccatccaccaatcttgccccagccaagaacaacaagagattcttttcaacaatgtgagatggctagcagtccagtcccgtcggtttgcaccattatacgctgtggaggcacgccgaattaacaaaatggagagcacaataaacaattatatacagttcaagagcaaacaccgtattgaaccagtatgtatgctcattcatgggtcaccagggacgggtaaatctatagctacttcattaataggtagagcaatagcagagaaggaaagcacatcagtctattcaatgccacctgacccatctcactttgatggctataaacaacaaggggtagtgattatggacgacctaaaccaaaaccccgatggtatggacatgaaactgttttgccaaatggtatcaacagtggagtttattcctccaatggcctcattagaggagaagggcattttgtttacatctgattatgtcctggcttctaccaactctcattcaattgtaccacccacagtggctcacagtgatgccttaaccagacgatttgcatttgatgtggaggtttacacgatgtctgaacattcagtcaaaggcaaactgaatatggccacggccactcaattgtgtaaggattgtccaacacctgcaaattttaaaaagtgttgccctctcgtttgtggaaaggccttgcaattaatggacaggtacaccagacaaaggttcactgtagatgagattaccacattaatcatgaatgagaaaaacagaagggccaatatcggcaattgcatggaagccttgtttcaaggaccattaaggtataaagatttgaagatcgatgtgaagacagttcccccccctgagtgcatcagtgatttgttacaagcagtggattctcaagaggttagggattactgtgagaagaaaggctggatcgttaacgttactagccagattcaactagaaaggaacatcaatagggccatgactatactccaagctgttaccacattcgcagcagtcgcaggagtagtgtatgtaatgtacaaactcttcgccggtcaacagggtgcatacactggcttgccaaacaaaaaacccaatgtccctactatcagagtcgctaaagtccaggggccaggatttgactacgcagtggcaatggcaaaaagaaacatagttactgcaaccaccaccaagggtgaatttaccatgctaggggtgcatgataatgtagcaatattgccaacccatgccgctccaggagaaaccattattattgatgggaaagaagtagagatcctagatgccagagccttagaagatcaagcgggaaccaatcttgagatcaccattattactctaaaaagaaatgagaagtttagagacatcagatcacatattcccacccaaattactgaaactaacgatggagtgttgatcgtgaacactagcaagtaccccaatatgtatgtccccgttggtgctgtgaccgaacagggatatcttaatctcagtggacgtcaaactgctcgcactttaatgtacaactttccaacaagggcaggccagtgcggaggaatcatcacttgtactggcaaagtcattgggatgcatgttggcgggaacggttcacatgggtttgcagcagccctcaagcgatcatacttcactcaaaatcagggcgaaatccagtggatgaggtcatcaaaagaagtggggtaccccattataaatgccccatccaagacaaagttagaacccagtgctttccactatgtttttgaaggtgttaaggaaccagctgtactcactaagaatgaccccagactaaaaacagattttgaagaagccatcttttctaaatatgtggggaacaaaattactgaagtggacgagtacatgaaagaagcagtggatcactatgcaggacagttaatgtcactggatatcaacacagaacagatgtgcctggaggatgccatgtacggcaccgatggtcttgaggccctggatcttagcactagtgctggatatccttatgttgcaatggggaaaaagaaaagagacattctagataaacagaccagagatactaaggagatgcagagacttttagatacctatggaatcaatctaccattagtcacgtacgtgaaagatgaactcaggtcaaagactaaagtggaacaaggaaagtcaagattgattgaagcttccagccttaatgattcagttgcaatgagaatggcctttggcaatctttacgcagctttccacaagaatccaggtgtggtgacaggatcagcagttggttgtgacccagatttgttttggagtaagataccagtgctaatggaagaaaaactcttcgcttttgactacacagggtatgatgcctcactcagccctgcttggtttgaagctcttaaaatggtgttagaaaaaattggatttggcagtagagtagactatatagactacctgaaccactctcaccacctttacaaaaacaagacttattgtgtcaaaggcggcatgccatccggctgctctggcacctcaattttcaactcaatgattaacaacctgatcattaggacgcttttactgagaacctacaagggcatagacttggaccatttaaaaatgattgcctatggtgatgacgtgatagcttcctacccccatgaggttgacgctagtctcctagcccaatcaggaaaagactatggactaaccatgactccagcagataaatcagtaacctttgaaacagtcacatgggagaatgtaacatttctgaaaagatttttcagagcagatgagaagtatccattcctggtgcatccagtgatgccaatgaaagaaattcacgaatcaatcagatggaccaaggaccctagaaacacacaggatcacgtacgctcgttgtgcctattagcttggcacaacggtgaagaagaatacaataaatttttagctaaaatcagaagtgtgccaatcggaagagctttattgctcccagagtactctacattgtaccgccgatggctcgactcattttagtaaccctacctcagtcggattggattgggttatactgttgtaggggtaaatttttctttaattcggagaaaaaaaaaaaaaaaaaaaaaaaaaaaaaa

SEQ ID NO: 4 - DNA, 713 bp, Artificial Sequence
  Modified Coxsackievirus CVA21 5' UTR
ttaaaacagctctggggttgttcccaccccagaggcccacgtggcggctagtactctggtattacggtacctttgtacgcctgttttgtatcccttcccccgtaactttagaagcttatcaaaagttcaatagcaggggtacaaaccagtacctctacgaacaagcacttctgtttccccggtgatatcacatagactgtacccacggtcaaaagtgattgatccgttatccgcttgagtacttcgagaagcctagtatcaccttggaatcttcgatgcgttgcgctcaacactctgccccgagtgtagcttaggctgatgagtctgggcactccccaccggcgacggtggcccaggctgcgttggcggcctacccatggctgatgccgtgggacgctagttgtgaacaaggtgtgaagagcctattgagctactcaagagtcctccggcccctgaatgcggctaatcctaaccacggagcaaccgctcacaacccagtgagtaggttgtcgtaatgcgtaagtctgtggcggaaccgactactttgggtgtccgtgtttccctttatattcatactggctgcttatggtgacaatttacaaattgttaccatatagctattggattggccacccagtattgtgcaatatatttgagtgtttctttcataagccttattaacatcacatttttaatcacaataaacagtgcaa

SEQ ID NO: 5 - DNA, 7212 bp, Enterovirus Human Rhinovirus
ttaaaacagcggatgggtatcccaccattcgacccattgggtgtagtactctggtactatgtacctttgtacgcctgtttctccccaaccacccttccttaaaattcccacccatgaaacgttagaagcttgacattaaagtacaataggtggcgccatatccaatggtgtctatgtacaagcacttctgtttcccaggagcgaggtataggctgtacccactgccaaaagcctttaaccgttatccgccaaccaactacgtaacagttagtaccatcttgttcttgactggacgttcgatcaggtggattttccctccactagtttggtcgatgaggctaggaattccccacgggtgaccgtgtcctagcctgcgtggcggccaacccagcttatgctgggacgcccttttaaggacatggtgtgaagactcgcatgtgcttggttgtgagtcctccggcccctgaatgcggctaaccttaaccctagagccttatgccacgatccagtggttgtaaggtcgtaatgagcaattccgggacgggaccgactactttgggtgtccgtgtttctcatttttcttcatattgtcttatggtcacagcatatatatacatatactgtgatcatgggcgctcaggtttctacacagaaaagtggatctcacgaaaatcaaaacattttgaccaatggatcaaatcagactttcacagttataaattactataaggatgcagcaagtacatcatcagctggtcaatcactgtcaatggacccatctaagtttacagaaccagttaaagatctcatgcttaagggtgcaccagcattgaattcacccaatgttgaggcctgtggttatagtgatagagtacaacaaatcacactcgggaattcaacaataacaacacaagaagcagccaacgctgttgtgtgttatgctgaatggccagagtaccttccagatgtggacgctagtgatgtcaataaaacttcaaaaccagacacttctgtctgtaggttttacacattggatagtaagacatggacaacaggttctaaaggctggtgctggaaattaccagatgcactcaaggatatgggtgtgttcgggcaaaacatgtttttccactcactaggaagatcaggttacacagtacacgttcagtgcaatgccacaaaattccatagcggttgtctacttgtagttgtaataccagaacaccaactggcttcacatgagggtggcaatgtttcagttaaatacacattcacgcatccaggtgaacgtggtatagatttatcatctgcaaatgaagtgggagggcctgtcaaggatgtcatatacaatatgaatggtactttattaggaaatctgctcattttccctcaccagttcattaatctaagaaccaataatacagccacaatagtgataccatacataaactcagtacccattgattcaatgacacgtcacaacaatgtctcactgatggtcatccctattgcccctcttacagtaccaactggagcaactccctcactccctataacagtcacaatagcacctatgtgcactgagttctctgggataaggtccaagtcaattgtgccacaaggtttgccaactacaactttgccggggtcaggacaattcttgaccacagatgacaggcaatcccccagtgcactgccaaattatgagccaactccaagaatacacatactagggaaagttcataacttgctagaaattatacaggtagatacactcattcctatgaacaacacgcatacaaaagatgaggttaacagttacctcataccactaaatgcaaacaggcaaaatgagcaggtttttgggacaaacctgtttattggtgatggggtcttcaaaactactcttctgggtgaaattgttcagtactatacacattggtctggatcacttagattctcttcgatgtatactggtcctgccttgtccagtgctaaactcactctagcatacaccccgcctggtgctcgtggtccacaggacaggagagaagcaatgctaggtactcatgttgtctgggatattggtctgcaatccaccatagtaatgacaataccatggacatcaggggtgcagtttagatatactgatccagatacatacaccagtgctggctttctatcatgttggtatcaaacttctcttatacttcccccagaaacgaccggccaggtctacttattatcattcataagtgcatgtccagattttaagcttaggctgatgaaagatactcaaactatctcacagactgttgcactcactgaaggcttaggtgatgaattagaagaagtcatcgttgagaaaacgaaacagacggtggcctcaatctcatctggtccaaaacacacacaaaaagtccccatactaactgcaaacgaaacaggggccacaatgcctgttcttccatcagacagcatagaaaccagaactacctacatgcactttaatggttcagaaactgatgtagaatgctttttgggtcgtgcagcttgtgtgcatgtaactgaaatacaaaacaaagatgctactggaatagataatcacagagaagcaaaattgttcaatgattggaaaatcaacctgtccagccttgtccaacttagaaagaaactggaactcttcacttatgttaggtttgattctgagtataccatactggccactgcatctcaacctgattcagcaaactattcaagcaatttggtggtccaagccatgtatgttccacatggtgccccgaaatccaaaagagtgggcgattacacatggcaaagtgcttcaaaccccagtgtattcttcaaggtgggggatacatcaaggtttagtgtgccttatgtaggattggcatcagcatataattgtttttatgatggttactcacatgatgatgcagaaactcagtatggcataactgttctaaaccatatgggtagtatggcattcagaatagtaaatgaacatgatgaacacaaaactcttgtcaagatcagagtttatcacagggcaaagctcgttgaagcatggattccaagagcacccagagcactaccctacacatcaatagggcgcacaaattatcctaagaatacagaaccagtaattaagaagaggaaaggtgacattaaatcctatggtttaggacctaggtacggtgggatttatacatcaaatgttaaaataatgaattaccacttgatgacaccagaagaccaccataatctgatagcaccctatccaaatagagatttagcaatagtctcaacaggaggacatggtgcagaaacaataccacactgtaaccgtacatcaggtgtttactattccacatattacagaaagtattaccccataatttgcgaaaagcccaccaacatctggattgaaggaagcccttattacccaagtagatttcaagcaggagtgatgaaaggggttgggccggcagagctaggagactgcggtgggattttgagatgcatacatggtcccattggattgttaacagctgaaggtagtggatatgtttgttttgctgacatacgacagttggagtgtatcgcagaggaacaggggctgagtgattacatcacaggtttgggtagagcttttggtgtcgggttcactgaccaaatctcaacaaaagtcacagaactacaagaagtggcgaaagatttcctcaccacaaaagttttgtccaaagtggtcaaaatggtttcagctttagtgatcatttgcagaaatcatgatgacttggtcactgttacggccactctagcactacttggatgtgatggatctccttggagatttctgaagatgtacatttccaaacactttcaggtgccttacattgaaagacaagcaaatgatggatggttcagaaagtttaatgatgcatgtaatgctgcaaagggattggaatggattgctaataagatttccaaactgattgaatggataaaaaacaaagtacttccccaagccaaagaaaaactagaattttgtagtaaactcaaacaacttgatatactagagagacaaataaccaccatgcatatctcgaatccaacacaggaaaaacgagagcagttgttcaataacgtattgtggttggaacaaatgtcgcaaaagtttgccccattttatgccgttgaatcaaaaagaatcagggaactcaagaacaaaatggtaaattatatgcaatttaaaagtaaacaaagaactgaaccagtgtgtgtattaatccatggtacacccggttctggtaaatcattaacaacatccattgtgggacgtgcaattgcagaacacttcaattcagcagtatattcacttccaccagatcccaagcactttgatggttatcagcaacaggaagttgtgattatggatgatctgaaccaaaatccagatggacaggatataagcatgttttgtcaaatggtttcttcagtggatttcttgcctccaatggctagtttagataacaagggcatgttattcaccagtaattttgttctagcctccacaaattctaacacactaagccccccaacaatcttgaatcctgaagctttagtcaggagatttggttttgacctagatatatgtttgcatactacctacacaaagaatggaaaactcaatgcaggcatgtcaaccaagacatgcaaagattgccatcaaccatctaatttcaagaaatgttgccccctagtctgtggaaaagctattagcttggtagacagaactaccaacgttaggtatagtgtggatcaactggtcacggctattataagtgatttcaagagcaaaatgcaaattacagattccctagaaacactgtttcaaggaccagtgtataaagatttagagattgatgtttgcaacacaccaccttcagaatgtatcaacgatttactgaaatctgtagattcagaagagattagggaatattgtaagaagaagaaatggattatacctgaaattcctaccaacatagaaagggctatgaatcaagccagcatgattattaatactattctgatgtttgtcagtacattaggtattgtttatgtcatttataaattgtttgctcaaactcaaggaccatattctggtaacccgcctcacaataaactaaaagccccaactttacgcccagttgttgtgcaaggaccaaacacagaatttgcactatccctgttaaggaaaaacataatgactataacaacctcaaagggagagttcacagggttaggcatacatgatcgtgtctgtgtgatacccacacacgcacagcctggtgatgatgtactagtgaatggtcagaaaattagagttaaggataagtacaaattagtagatccagagaacattaatctagagcttacagtgttgactttagatagaaatgaaaaattcagagatatcaggggatttatatcagaagatctagaaggtgtggatgccactttggtagtacattcaaataactttaccaacactatcttagaagttggccctgtaacaatggcaggacttattaatttgagtagcacccccactaacagaatgattcgttatgattatgcaacaaaaactgggcagtgtggaggtgtgctgtgtgctactggtaagatctttggtattcatgttggcggtaatggaagacaaggattttcagctcaacttaaaaaacaatattttgtagagaaacaaggccaagtaatagctagacataaggttagggagtttaacataaatccagtcaacacggcaactaagtcaaaattacatcccagtgtattttatgatgtttttccaggtgacaaggaacctgctgtattgagtgacaatgatcccagactggaagttaaattgactgaatcattattctctaagtacaaggggaatgtaaatacggaacccactgaaaatatgcttgtggctgtagaccattatgcagggcaactattatcactagatatccccacttctgaacttacactaaaagaagcattatatggagtagatggactagaacctatagatattacaaccagtgcaggatttccctatgtgagtcttgggatcaaaaagagagacattctgaataaagagacccaggacacagaaaagatgaagttttatctagacaagtatggcattgacttgcctctagttacatatattaaggatgaattaagaagtgttgacaaagtccgattagggaaaagtagattaattgaagcctccagtttgaatgattctgttaacatgagaatgaaactaggcaacctttacaaagcattccatcaaaatcccggtgttctgactggatcagcagtgggttgtgatcctgatgtgttttggtctgtcatcccttgcttaatggatgggcacctgatggcatttgattactctaattttgatgcctctttgtcaccagtttggtttgtctgtctagagaaggttttgaccaagttaggctttgcaggctcttcattaattcaatcaatttgtaatacccatcatatctttagggatgaaatatatgtggttgaaggtggcatgccctcagggtgttcaggaaccagcatattcaattccatgatcaacaacataatcattaggactttgatattagatgcatataaaggaatagatttagacaaacttaaaatcttagcttacggtgatgatttgattgtttcttatccttatgaactggatccacaagtgttggcaactcttggtaaaaattatggactaaccatcacacccccagacaaatctgaaacttttacaaaaatgacatgggaaaacttgacatttttaaagagatacttcaagcctgatcaacaatttccctttttggttcacccagttatgcccatgaaagatatacatgagtcaatcagatggacaaaggatcctaaaaacacacaggatcacgtccgatcattatgcatgttagcatggcactcaggagaaaaagagtacaatgaattcattcagaagatcagaactactgacattggaaaatgtctaattctcccagaatacagcgtacttaggaggcgctggttggacctcttttaggttaacaatatagacacttaatttgagtagaagtaggagtttat

SEQ ID NO: 6 - DNA, 7443 bp, Enterovirus Human Poliovirus
ttaaaacagctctggggttgttcccaccccagaggcccacgtggcggccagtactctggtaccacggtacctttgtgcgcctgttttatactccctcccccatgcaaccttagaagcaattcacaaagttcaatagagggggtacaaaccagtatcaccacgaacaagcacttctgtctccccggtgatctcgtataggctgtgcccacggctgaaaacaagtgatccgttatccgcttaggtacttcgagaagcctagtatcaccctgggatctttgacgcgttgcgctcagcactctaccccgagtgtagcttaggctgatgagtctgggcattccccaccggtgacggtggcccaggctgcgttggcggcctacccatggctaacgccatgggacgctatttgtgaacaaggtgtgaagagcctattgagctacctaagagtcctccggcccctgaatgcggctaatcccaaccacggagcaagtgccttcaacccagagggtagcttgtcgtaacgcgcaagtctgtggcggaaccgactactttgggtgtccgtgtttccttttatttttattgtggctgcttatggtgacaatcattgattgccatcataaagcgagttggattggccatccggtgaaagtcaagaacctcgtccacttatcttttggatttgttccatcgactcaactcacgcctgatttgataaccatagtgttattgattagaaaaagctatcataatgggtgctcaggtctcatctcagaaagttggagctcacgaaaactcgaacagagcgtatggtggttccactatcaactacaccaccattaattattatagagactcagctagcaacgcggcttcgaaacaagatttctctcaagacccatctaaattcactgaacccatcaaagatgtgctgatcaaaacagctccaacgctaaattctccaaacattgaagcctgcgggtacagtgatagagtcttgcaattaactctgggaaattccaccattaccactcaggaagcggcaaattcagtggtcgcatatgggcggtggccagaatatttgagagacagtgaagccaacccagtggaccaaccaacagaaccagatgttgccgcatgcagattttacacactcgacacggtttcttggactaaggagtcaaaagggtggtggtggaaactacccgatgcactgagggacatgggattgtttgggcagaatatgtattaccactacctagggagatccgggtacacagtacacgtacagtgcaatgcatctaaatttcaccagggggcacttggtgtgtttgctgtgccagaaatgtgcttggccggggatagcaacaccactcccacacacaccagttaccagaatgcaaacccgggcgagaaggggggcaccttcacgggtacttttacaccagataataatcagacaacgcccgcccgtaagttctgccccgtggattacctctttggtaatggtactctactaggtaacgcgttcgtgtttccacatcaaataatcaacctgcgtaccaacaattgtgcaactttggtgctcccatacgtgaactctctctctattgacagcatggtgaagcacaacaactgggggatcgcaatactgccgttagcccctctaaactttgccaatgagtcatccccagagatccccatcacgctaaccatagcaccgatgtgctgtgagtttaatgggttgagaaacatcactctgcctcgactgcaggggctccccgtcatgaatactcctggtagcaatcaataccttactgctgacaacttccaatcaccgtgcgcattgcctgaatttgacgtcaccccacctattgacatacccggggaggttaaaaacatgatggaattggccgaaattgacaccatgattcccttcaatttgagtgccacaaaaaagaacactatggaaatgtacagggttcagttgagtgacaaaccacacacggacgatccaatactttgcttgtcattatcaccggcctcagatcctaggctgtcccacacaatgcttggagaaattttgaattattacacacattgggcaggatccttgaaattcacatttttattctgtggttccatgatggcaacaggaaaactgctggtgtcctacgctcctcctggagccgacccaccaaagaaacgtaaagaggcgatgctggggacacatgtgatctgggacattggattgcaatcctcctgtaccatggtggtgccctggatcagcaacaccacatacagacaaaccattgatgacagttttactgagggtggttatattagtgtgttttaccagaccagaatagtggttcccctttccacacccagagagatggatattctcgggtttgtgtcagcatgtaacgatttcagcgtgcgcctgttgcgtgatactacgcatattgaacagaaggcgttagctcaaggtctgggacagatgctagagagcatgatagacaacacagttcgtgaaacgataggagcttcgacctcaagggatgccctcccgaacaccgagcccagtggtccagcacattctaaagagatacctgcactcactgcagtggaaacgggagccacaaacccgttagttccatcggacacggtacaaaccagacacgtcatacaacacagatcgagatcggagtctagtattgaatctttctttgcgcgtggtgcatgtgtgactatcatgactgtggacaattcggctaccaccacatctaaagataagctgttttcagtgtggaaaattacatacaaggacactgtgcaactgagaagaaagctggagtttttcacgtattccagatttgacatggaattcacctttgtaatcactgccaattttacagaaaccaataatgggcacgctttaaatcaggtataccaaatcatgtacgtaccaccaggcgcgccggtgccggagaaatgggacgattacacgtggcagacttcatcaaatccttcaatattttacacatatggcacagcaccggcccgcatttcagtaccatatgttggtatctcgaacgcctactcacacttctacgacgggttctccaaaataccgttaaaagaccagacggtagcgttgggtgattcgctttacggtgcagcgtccctaaatgactttggtatcttggctgtcagagtggttaatgatcacaacccaaccacggttacttctaaggtcagagtgtacttgaagcccaagcatatcagggtgtggtgtcctcgcccaccgagagcagtggcgtattatggtccaggcgtggactacaaggatggaactctcacccccctctctacaaaagatctgaccacttatgggctcggacaccagaataaagcagtgtatactgcaggttacaagatctgtaactaccacctagctactccagatgatcttcaaaatgcggtgaacattatgtggaatagagacctgataattgttgaatccaaagcccagggtattgattccatagccagatgcacatgcaataccggtgtttactattgtgagtctaagagaaagtattacccggtatcattcgtgggccccacttttcaatacatggaagccaatgattattacccagcaagatatcagtcccacatgctcatcggtcacgggttcgcatcccccggtgactgtgggggcatcttgaggtgccaacatggggtaataggaataatcacagcaggaggagagggtctcgtcgcattctcagacatcagggacttgtacgcctatgaggaagaggctatggagcagggaatttctaactatattgagtctcttggagctgctttcgggagtggattcactcagcaaattggggacaagatctcagagctaactaatatggttactagtactattactgaaaagttactcaaaaacctgatcaaaatcatatcgtctctagtgatcatcaccagaaactacgaggacaccaccactgttctcgctaccctagcgctcctgggatgtgacgtctccccatggcaatggttgaagaagaaagcatgcgacatcttggagataccatatgtcatccgccaaggagatagttggctcaagaaattcacagaagcttgcaacgctgccaaggggcttgaatgggtttcaaacaagatctccaaattcattgattggttgaaagaaaagatcataccccaagctagagacaaactcgagtttgtgaccaaactcaaacagcttgagatgttagaaaatcaaattgccacaatacatcaatcctgtccgagtcaggaacatcaggagattctcttcaacaacgtgaggtggttatccatccagtctaagagatttgcccctctttatgctgtagaagcaaagagaattcaaaaattggagcacacaatcaacaattatatacagttcaagagcaaacaccgtattgagccagtatgtttgttggtgcatggtagtccaggaaccggcaagtcagttgcaactaacttgattgcaagggcaatagctgagaaagaaaacacatctacctactctctaccaccggaccctagccatttcgacgggtacaagcagcaaggtgtggtgattatggacgacctcaaccaaaaccctgatggtgctgacatgaaactattttgtcaaatggtctccacagtggaatttatcccaccaatggcgtccctagaggagaagggcatactattcacctccaattatgtgttggcatccacaaactccagtcgcatcacaccaccaacagttgcgcacagtgacgcattggccaggagatttgccttcgatatggacattcaggttatgggtgagtactccagggacggcaagctcaatatggcaatggccacagaaatgtgcaaaaactgccatcaaccagcaaatttcaagcggtgctgccccttagtatgtggtaaggcgatccaattgatggacaaggcatccagagtcaggtacagtgtggaccaaattaccaccatgatcattaatgaaagaaacaggagatccaacattggtaattgtatggaagcactctttcaagggccacttcaatacaaagatctaaaaatagacattaaaaccacaccacctccagagtgtatcaatgacctgcttcaagcagttgattcccaggaagtcagggattattgtgaaaagaaaggatggattgtcaacattactagccaggttcagactgagaggaatatcaatagggccatgacaatactgcaggcagtcacaacctttgcagcggtggcaggtgtagtgtatgttatgtacaaactctttgctggccaacaaggcgcgtacactggactcccaaacaagaaacctaatgtcccaactattaggactgcaaaggtgcaaggaccaggtttcgactatgcagttgcgatggccaagaggaacatcgtcactgctaccaccagcaaaggggaattcactatgcttggggtccatgacaacgtggccgtgcttccaacgcacgcgtcacctggtgacactatcgtaattgatggaaaggaagtggaggttcttgatgccaaagcgctcgaagatcaagctggtaccaacctggaaatcaccatcgtcactcttaaaagaaatgaaaaatttagggacattagaccacacatccccactcaaatcaccgaaactaatgatggagtgctgattgtaaacaccagtaagtaccccaacatgtatgtacccgtcggtgcagtgaccgaacaagggtacctcaatctgggaggacgccaaacggcacgcaccctgatgtacaacttcccaactcgagctggtcagtgtggtggcattatcacgtgcaccggcaaagtaatagggatgcatgttggaggtaacggttcacatggtttcgctgcagccttaaagcggtcgtacttcactcagagtcaaggtgagattcagtggatgagaccatcaaaagaagttgggtacccaatcattaatgcccccagcaagactaagcttgagcccagtgctttccactacatctttgagggagtaaaagagccagctgtgttgaccaaaaatgacccaagattgaaaactgattttgaagaggccatcttctcaaagtatgtaggtaacaaaatcactgaggtagacgagtacatgaaagaggcagtggatcattatgcgggtcaacttatgtcattagacatcaatactgaacaaatgtgcttagaagatgctatgtatggaactgatggtttagaagccttagatctatcaacaagtgctgggtatccatatgtagcattaggtaagaaaaagagagacatattgaacaaacagaccagagacactaaggagatgcagaaactcctcgatacttatgggataaacttgccactggtcacctatgtgaaagatgaactcagatctaaaaccaaagtggaacaaggcaaatccaggttaattgaagcctcgagtttaaatgactctgtggcaatgagaatggcctttggtcatttgtacgcagctttccataaaaacccaggagtggtgacaggatcagcagtgggatgtgacccggatttgttttggagtaaaataccagtcctaatggaagagaaactgtttgcttttgattacacgggttatgatgcatcacttagtcccgcttggtttgaagcactaaaaatggtgttagaaaagattggatttggtgatagggtggattacatcgattatctcaaccactcacaccatctttacaaaaacaaaacatactgtgtcaagggtggtatgccatctggctgttcaggcacatcaatattcaattcaatgatcaataacttaattatcaggacactcttactgaaaacctacaagggcatagatttggaccacctaaagatgattgcctatggtgatgatgtaattgcttcctacccccatgaggttgacgctagtctcctagcccaatcaggaaaagactatggactaaccatgactccagccgataagtcggccacttttgaaacagtcacatgggagaacgtaacattcttgaaaagattcttcagagcagatgagaaataccctttcttaatacacccagtcatgccaatgaaggaaattcatgaatcaattagatggacaaaggatcccagaaacactcaggatcatgttcgctcgttgtgcctattggcctggcacaatggcgaagaggaatataacaaattcttagctaaaataaggagtgtgcccatcggaagagcgctactgctccccgagtactcaacattgtaccgccgatggctcgactcattttagtaaccctacttcagtcggattggattgggttatattgtcgtaggggtaaatttttctttaattcggag

SEQ ID NO: 7 - DNA, 7406 bp, Enterovirus Coxsackievirus
ttaaaacagctctggggttgttcccaccccagaggcccacgtggcggctagtactctggtattacggtacctttgtacgcctgttttgtatcccttcccccgtaactttagaagcttatcaaaagttcaatagcaggggtacaaaccagtacctctacgaacaagcacttctgtttccccggtgatatcacatagactgtacccacggtcaaaagtgattgatccgttatccgcttgagtacttcgagaagcctagtatcaccttggaatcttcgatgcgttgcgctcaacactctgccccgagtgtagcttaggctgatgagtctgggcactccccaccggcgacggtggcccaggctgcgttggcggcctacccatggctgatgccgtgggacgctagttgtgaacaaggtgtgaagagcctattgagctactcaagagtcctccggcccctgaatgcggctaatcctaaccacggagcaaccgctcacaacccagtgagtaggttgtcgtaatgcgtaagtctgtggcggaaccgactactttgggtgtccgtgtttccctttatattcatactggctgcttatggtgacaatttacaaattgttaccatatagctattggattggccacccagtattgtgcaatatatttgagtgtttctttcataagccttattaacatcacatttttaatcacaataaacagtgcaaatgggggctcaagtttcaacgcaaaagaccggtgcgcacgagaatcaaaacgtggcagccaatggatccaccattaattacactactatcaactattacaaagacagtgcgagtaattccgctactagacaagacctctcccaagatccatcaaaattcacagaaccggttaaggacttaatgttgaaaacagcaccagctctaaactcgcctaacgtggaagcatgtgggtacagtgaccgtgtgaggcaaatcactttaggcaactcgactattactacacaagaagcagccaatgctattgttgcttacggtgaatggcccacttacataaatgattcagaagctaatccggtagatgcacccactgagccagacgttagtagcaaccggttttacaccctagaatcggtgtcttggaagaccacttcaaggggatggtggtggaagttaccagattgtttgaaggacatgggaatgtttggtcagaatatgtactatcactacttggggcgctctggttacaccattcatgtccagtgcaacgcttcaaaatttcaccaaggggcgttaggagttttcctgataccagagtttgtcatggcttgcaacactgagagtaaaacgtcatacgtttcatacatcaatgcaaatcctggtgagagaggcggtgagtttacgaacacctacaatccgtcaaatacagacgccagtgagggcagaaagtttgcagcattggattatttgctgggttctggtgttctagcaggaaacgcctttgtgtacccgcaccagatcatcaacctacgtaccaacaacagtgcaacaattgtggtgccatacgtaaactcacttgtgattgattgtatggcaaaacacaataactggggcattgtcatattaccactggcacccttggcctttgccgcaacatcgtcaccacaggtgcctattacagtgaccattgcacccatgtgtacagaattcaatgggttgagaaacatcaccgtcccagtacatcaagggttgccgacaatgaacacacctggttccaatcaattccttacatctgatgacttccagtcgccctgtgccttacctaattttgatgttactccaccaatacacatacccggggaagtaaagaatatgatggaactagctgaaattgacacattgatcccaatgaacgcagtggacgggaaggtgaacacaatggagatgtatcaaataccattgaatgacaatttgagcaaggcacctatattctgtttatccctatcacctgcttctgataaacgactgagccacaccatgttgggtgaaatcctaaattattacacccattggacggggtccatcaggttcacctttctattttgtggtagtatgatggccactggtaaactgctcctcagctattccccaccgggagctaaaccaccaaccaatcgcaaggatgcaatgctaggcacacacatcatctgggacctagggttacaatccagttgttccatggttgcaccgtggatctccaacacagtgtacagacggtgtgcacgtgatgacttcactgagggcggatttataacttgcttctatcaaactagaattgtggtacctgcttcaacccctaccagtatgttcatgttaggctttgttagtgcgtgtccagacttcagtgtcagactgcttaaggacactccccatattagtcaatcgaaactaataggacgtacacaaggcattgaagacctcattgacacagcgataaagaatgccttaagagtgtcccaaccaccctcgacccagtcaactgaagcaactagtggagtgaatagccaggaggtgccagctctaactgctgtggaaacaggagcatctggtcaagcaatccccagtgatgtggtggaaactaggcacgtggtaaattacaaaaccaggtctgaatcgtgtcttgagtcattctttgggagagctgcgtgtgtcacaatcctatccttgaccaactcctccaagagcggagaggagaaaaagcatttcaacatatggaatattacatacaccgacactgtccagttacgcagaaaattagagtttttcacgtattccaggtttgatcttgaaatgacttttgtattcacagagaactatcctagtacagccagtggagaagtgcgaaaccaggtgtaccagatcatgtatattccaccaggggcaccccgcccatcatcctgggatgactacacatggcaatcctcttcaaacccttccatcttctacatgtatggaaatgcacctccacggatgtcaattccttacgtagggattgccaatgcctattcacacttctacgatggctttgcacgggtgccacttgagggtgagaacaccgatgctggcgacacgttttacggtttagtgtccataaatgattttggagttttagcagttagagcagtaaaccgcagtaatccacatacaatacacacatctgtgagagtgtacatgaaaccaaaacacattcggtgttggtgccccagacctcctcgagctgtattatacaggggagagggagtggacatgatatccagtgcaattctacctctgaccaaggtagactcaattaccacttttgggtttggtcatcagaacaaagcagtgtacgttgccggttacaagatttgcaactaccacctagcaaccccaagtgatcacttgaatgcaattagtatgttatgggacagggatttaatggtggtggaatctagagcccagggaactgataccatcgccagatgtagttgcaggtgtggagtttactattgtgaatctaggaggaagtactaccctgtcacttttactggcccaacgtttcgattcatggaagcaaacgactactatccagcaagataccagtctcacatgctgatagggtgcggatttgcagaacccggggactgcggtgggatactgaggtgcactcatggggtaattggtatcattactgcaggaggtgaaggggtagtagcctttgctgacattagagacctctgggtgtatgaagaggaggccatggaacagggaataacaagctacatcgaatctctcggcacagcctttggcgcagggttcacccacacaatcagtgagaaagtgactgaattgacaacaatggttaccagcactatcacagaaaaactactgaaaaacttggtgaaaatagtgtcggctctagtgattgttgtgagaaattatgaggacactaccacgatccttgcaacactagcactactcgggtgtgatatatctccttggcaatggttgaagaagaaggcatgtgacttactagagattccttatgtgatgcgccaaggtgatgggtggatgaagaaattcacagaggcgtgcaatgcagctaaaggcttagagtggattagcaacaaaatttccaagtttgtagattggttgaagtgtaaaattatcccagacgctaaggacaaggtggaatttctcaccaagttgaaacagctagacatgttggaaaatcaaattgcaaccatccaccaatcttgccccagccaagaacaacaagagattcttttcaacaatgtgagatggctagcagtccagtcccgtcggtttgcaccattatacgctgtggaggcacgccgaattaacaaaatggagagcacaataaacaattatatacagttcaagagcaaacaccgtattgaaccagtatgtatgctcattcatgggtcaccagggacgggtaaatctatagctacttcattaataggtagagcaatagcagagaaggaaagcacatcagtctattcaatgccacctgacccatctcactttgatggctataaacaacaaggggtagtgattatggacgacctaaaccaaaaccccgatggtatggacatgaaactgttttgccaaatggtatcaacagtggagtttattcctccaatggcctcattagaggagaagggcattttgtttacatctgattatgtcctggcttctaccaactctcattcaattgtaccacccacagtggctcacagtgatgccttaaccagacgatttgcatttgatgtggaggtttacacgatgtctgaacattcagtcaaaggcaaactgaatatggccacggccactcaattgtgtaaggattgtccaacacctgcaaattttaaaaagtgttgccctctcgtttgtggaaaggccttgcaattaatggacaggtacaccagacaaaggttcactgtagatgagattaccacattaatcatgaatgagaaaaacagaagggccaatatcggcaattgcatggaagccttgtttcaaggaccactaaggtataaagatttgaagatcgatgtgaagacagttcccccccctgagtgcatcagtgatttgttacaagcagtggattctcaagaggttagggattactgtgagaagaaaggctggatcgttaacgttactagccagattcaactagaaaggaacatcaatagggccatgactatactccaagctgttaccacattcgcagcagtcgcaggagtagtgtatgtaatgtacaaactcttcgccggtcaacagggtgcatacactggcttgccaaacaaaaaacccaatgtccctactatcagagtcgctaaagtccaggggccaggatttgactacgcagtggcaatggcaaaaagaaacatagttactgcaaccaccaccaagggtgaatttaccatgctaggggtgcatgataatgtagcaatattgccaacccatgccgctccaggagaaaccattattattgatgggaaagaagtagagatcctagatgccagagccttagaagatcaagcgggaaccaatcttgagatcaccattattactctaaaaagaaatgagaagtttagagacatcagatcacatattcccacccaaattactgaaactaacgatggagtgttgatcgtgaacactagcaagtaccccaatatgtatgtccccgttggtgctgtgaccgaacagggatatcttaatctcagtggacgtcaaactgctcgcactttaatgtacaactttccaacaagggcaggccagtgcggaggaatcatcacttgtactggcaaagtcattgggatgcatgttggcgggaacggttcacatgggtttgcagcagccctcaagcgatcatacttcactcaaaatcagggcgaaatccagtggatgaggtcatcaaaagaagtggggtaccccattataaatgccccatccaagacaaagttagaacccagtgctttccactatgtttttgaaggtgttaaggaaccagctgtactcactaagaatgaccccagactaaaaacagattttgaagaagccatcttttctaaatatgtggggaacaaaattactgaagtggacgagtacatgaaagaagcagtggatcactatgcaggacagttaatgtcactggatatcaacacagaacagatgtgcctggaggatgccatgtacggtaccgatggtcttgaggccctggatcttagcactagtgctggatatccttatgttgcaatggggaaaaagaaaagagacattctagataaacagaccagagatactaaggagatgcagagacttttagatacctatggaatcaatctaccattagtcacgtacgtgaaagatgaactcaggtcaaagactaaagtggaacaaggaaagtcaagattgattgaagcttccagccttaatgattcagttgcaatgagaatggcctttggcaatctttacgcagctttccacaagaatccaggtgtggtgacaggatcagcagttggttgtgacccagatttgttttggagtaagataccagtgctaatggaagaaaaactcttcgcttttgactacacagggtatgatgcctcactcagccctgcttggtttgaagctcttaaaatggtgttagaaaaaattggatttggcagtagagtagactatatagactacctgaaccactctcaccacctttacaaaaacaagacttattgtgtcaaaggcggcatgccatccggctgctctggcacctcaattttcaactcaatgattaacaacctgatcattaggacgcttttactgagaacctacaagggcatagacttggaccatttaaaaatgattgcctatggtgatgacgtgatagcttcctacccccatgaggttgacgctagtctcctagcccaatcaggaaaagactatggactaaccatgactccagcagataaatcagcaacctttgaaacagtcacatgggagaatgtaacatttctgaaaagatttttcagagcagatgagaagtatccattcctggtgcatccagtgatgccaatgaaagaaattcacgaatcaatcagatggaccaaggaccctagaaacacacaggatcacgtacgctcgttgtgcctattagcttggcacaacggtgaagaagaatacaataaatttttagctaaaatcagaagtgtgccaatcggaagagctttattgctcccagagtactctacattgtaccgccgatggctcgactcattttagtaaccctacctcagtcggattggattgggttatactgttgtaggggtaaattttcctttaatttcggag

SEQ ID NO: 8 - DNA, 7414 bp, Enterovirus Bovine Enterovirus
ttaaaacagcctgggggttgtacccacccctggggcccacgtggcgctagtactctggttcgttagaacctttgtacgcctgttttcccctccttaaacaaattaagatctctgccaatgtggggagtagtccgactccgcaccgatacgtcgcaccagtagaccggttcgcttaggacccttctacggattggtatgagttccccaccccgtaacttagaagtactagcaaaaccgaccaataggagcgtggcacccagctgcgttaaggtcaagcacttctgtctccccggccagaaatggtcgtcacccgccctctctactacgagaagcctattaaccattgaaggcgatgaggagttgcgctccaccacaaccccagtggtagctctgagagatggggctcgcagtcacccccgtggtaacacggttgcttgcccgcgtgtgctctcgggttcggccacttggccgttcactccaactcgttgtaagtggccaagagcctattgtgctagagaggttttcctccggagccgtgaatgctgctaatcccaacctccgagcgtgtgcgcacaatccagtgttgctacgtcgtaacgcgcaagttggaggcggaacagactactttcggtactccgtgtttccttattattttatacaacaatttatggtgacattgactgatactattgagttcgcccgcttgccattgaatattgccttgtattaccttatagcatttcaaaaagccacagatctcaccctcgagctcattcactttgcagtttgtttgaatcgcatacacaagacatttgaacatgggagcccagttgagcagaaatactgccgggagccacactactggaacctacgctaccggaggctcaaccattaattataacaacattaactactacagccacgccgcttctgcagcgcagaacaaacaagacttcacccaggacccatccaagttcactcagccaattgcggatgtgataaaggagacagcggttccacttaagtcaccaagcgcagaagcgtgcggttacagtgatcgcgtagcccagttgacacttggcaacagcactatcactacccaagaggcagcaaatatatgcgttgcttatggctgctggcctgcaaagcttagcgacactgatgccacatcagtggacaagcccactgaaccaggtgtatcagcggagcgcttttataccctccgttccaagccgtggcaggcagatagcaaggggtggtattggaagctacccgatgcactcaacaatacaggaatgtttggacagaacgcccagttccactacatctatagaggtgggtgggcagtgcacgtccaatgcaatgcaaccaaattccaccagggcacgctccttgtgcttgcaatcccagaacaccaaatcgccacacaagagcagcccgcttttgacagaaccatgccaggcagcgaaggcggcactttccaagagcccttctggctcgaggatggaacgtctttaggaaactccctgatctatccgcaccagtggatcaaccttaggacaaacaattcagcaaccctgatattaccatacgtgaatgccattccgatggactcggccattaggcattcaaattggacactagctatcattccagttgcacccttgaaatatgcagccgagaccacgccgcttgtccccattactgtgactatcgcaccgatggagacggagtacaacgggcttagacgcgctatagctagcaatcaaggccttccaactaagccagggccaggttcctaccagttcatgactactgatgaggattgttccccgtgcattttgcctgatttccagccgacccctgaaattttcatccctggtaaggtcaataaccttttggaaattgcgcaagttgagtctatccttgaggccaacaacagggaaggggtagagggtgttgagcggtatgtcatcccagtaagtgttcaggacgcattggatgcccagatttatgccctaagacttgagcttggcggaagtggccctctctcctccagccttctaggtaccttagcaaagcattatacccaatggagtgggtcagtggagatcacctgcatgttcactggcaccttcatgacaacaggaaaggtcctcttggcatacacacctccaggtggagatatgcctaggaatagagaagaagccatgcttggaacgcatgttgtctgggactttggtctacaatcatcaataaccttggtcataccttggatctctgcatcacattttagaggagtcagtaatgacgatgtgctgaattaccaatattatgcagcaggtcatgtcaccatctggtaccaaacaaacatggtaatccctccgggattccctaacacggcaggcataatcatgatgattgccgcacagccaaacttctccttccgcattcaaaaggatagggaagacatgacccaaactgcaattctgcagaatgacccaggcaagatgctaaaggatgcgattgacaaacaagttgcaggagccctagttgctggtaccacgacatccacccactcagtagccacggacagcacaccagccctgcaggccgctgagactggtgccacgtcaactgccagggatgagagcatgattgagacccgcactattgtgccgactcacggtatccacgagacaagtgtggagagtttctttggacgctcctcactcgtgggtatgccgctgctggccactggcaccagtatcaccaactggcgcattgacttcagggagttcgtccagttgagagccaagatgtcctggtttacttacatgcgctttgacgtggagttcaccataattgcaacaagttctactgggcagaatgttaccaccgagcagcacaccacttaccaggtgatgtacgtcccccctggggcacccgttccctccaatcaagactcatttcagtggcaatctgggtgcaacccctcggtattcgcggacacggacggaccacctgcccaattctcagtacccttcatgagctcagccaatgcgtattccacggtttatgatgggtacgcacgattcatggacactgacccagatagatatggcatcctcccgagcaatttcctgggattcatgtacttcaggacactcgaagacgcagcacaccaagtaaggttccgcatctgtgccaaaataaaacacaccagctgctggatcccacgtgcacccagacaagcaccatacaagaagaggtacaacctggtattcagtggggattccgacaggatttgttctaacagagccagcttgactagctatggaccctttgggcagcagcagggtgctgcgtatgtgggctcctacaaaattttaaacagacaccttgccacatacgctgattgggaaaatgaagtctggcaatcttaccagcgtgatctacttgttactagagttgatgctcacgggtgtgacaccatcgctcgatgcaattgcagatctggtatctattactgcaaatccacagccaagcactatcctattgtagtcacgcccccatctatctacaagattgaggccaacgattattacccagaaagaatgcaaactcacatccttcttgggattggcttcgctgagcccggtgattgcggtggtcttcttcgttgtgagcatggtgttatgggcattcttacggttggcggtggagaccatgtcgggtttgcagatgttcgtgacctcctttggatagaggatgacgccatggaacagggaatcactgactacgtccaacagttaggcaatgcctttggagctggattcactgctgagattgcaaattacaccaaccaactcagggacatgttaatgggctcagattcagtagtagagaagatcattaggtctcttgtccgactggtttctgcgctggttatagtggtgagaaaccaccaggatttgattaccgtgggagcaaccctcgcccttctaggttgtgaaggctctccatggaaatggctgaagagaaaggtttgccaaattcttggaatcaacatggcagaaaggcagtcagacaactggatgaaaaagttcactgagatgtgcaacgccttcagaggcctagactggatcgcagcaaaaatctccaagtttattgattggcttaaacaaaagatcctaccagaactcaaagagagagcagagttcgtcaagaagttaaaacagctcccactcttagaggctcaggtgaacactctggaacactcttccgctagtcaggagaggcaagaacaattgtttgggaatgttcagtaccttgcccatcattgtagaaagaacgccccgctttatgccgcagaagctaagcgcgtctaccatctagagaagcgcgtcctccgtgccatgcagttcaagaccaagaaccgcattgaacctgtatgtgcactgattcatggctcacctggtaccggtcagtcgttggctactatgatagtaggaagaaaactggctgagtacgaaggttccgacgtctactccctaccgcctgacccggatcattttgatggctaccaacaacaagccgtcgtagtgatggatgatttacttcaaaaccccgatgggaaggacatgaccttgttttgccaaatggtttcgacggctccttttactgtgcccatggctgctttggaggataaggggaagctcttcacttccaaatttgtgctagcttctactaatgcaggccaagttactccgccaaccgtggctgattataaggcgctgcagagaaggtttttctttgattgtgacattgaggtccagaaggaatacaaaagagatggggtcactctggatgtggccaaggctactgagacctgtgaagactgctccccagccaatttcaagaagtgcatgccgttgatttgcggaaaggccctccagctaaaatcgcgcaagggcgatgggatgagatacagcctggacaccctgattagtgagcttcggcgtgagagcaaccgccgttacaatattggcaacgtccttgaggccctgttccaagggccagtgtgttataagcctcttagaattgaagttcatgaggaagaaccagcaccttccgccattagcgatttgctgcaggcagtcgatagtgaggaggtgagggaatattgcaggtccaagggttggattgttgaagagagggtcactgaacttaagcttgagcgcaacgtgaaccgtgcgctggcagtcattcagagtgtgtctctcattgctgcagtggctgggaccatttacatagtttatcgcctcttttctggtatgcagggcccttactcaggtatcggcacaaactacgccacaaagaaaccagtggtaagacaggtacaaacccaaggtcctctttttgatttcggcgtctccctacttaagaagaacattaggacagtcaaaacaggtgcaggcgagtttaccgccctgggggtttatgatactgtggtggtcctgccccgccatgccatgcctggcaagaccattgaaatgaatgggaaggacattgaagttttggacgcttatgacctcaacgacaagaccgacacttctctagaattgaccatagtgaaattgaaaatgaatgagaagttcagggacattagagcaatggttccggaccaaattacagattacaatgaggcagtggtggttgtgaatacctcatactacccccagctttttacctgcgtggggcgtgtcaaggactacggattcctgaaccttgctggcaggccaacacatagagttttgatgtatgaattccccaccaaggcaggccaatgcggtggtgtggttattagcatgggtaagatagtgggtgtccacgtaggaggtaacggtgcccaaggttttgccgcctcccttctacgcaggtactttacagcagaacaaggacaaattgaatatatcgagaagagtaaagatgccgggtaccccgtgatcaatgcacccacccaaaccaaattagagcccagtgttttctttgatgttttccccggggtgaaagaaccagcggtactccacaagaaggacaagaggcttgaaaccaactttgaggaagctctattttccaagtacataggaaatgtacaaagggacatgcctgaggaattactcattgccatagatcattattctgaacaactcaaaatgttgaatattgacccgaggcccatttcaatggaggatgcaatttacggtacagaggggcttgaggcacttgatcttggaactagtgcgagctacccgtacgttgcaatgggcatcaagaaaagagatattttgaataaagagaccagggatgtcactaagatgcaagagtgcatagataagtatggtttaaatctacccatggtcacctatgtcaaggatgaactcagggcgccagataagatcaggaaaggaaaaagccgtttgatagaggcatctagcttgaatgattcagtagccatgcggtgctactttgggaacctctacaaggttttccacaccaaccctggaaccatctccggctgtgccgttggatgcgaccctgaaaccttctggagcaagatcccagtgatgatggatggtgagctttttggctttgattatactgcatatgatgctagcctgtctcccatgtggttccatgccctggcagaagtccttagacggattggatttgttgagtgcaagcactttattgatcaactttgctgcagccaccacctttatatggataagcactattatgtggttgggggcatgccttctggctgctctggcacctccatcttcaattctatgattaacaacctaatcatccgcactcttgtgctcacagtttataaaaatattgatttggatgatcttaagataatagcctacggggatgacgtgctcgcgtcgtacccgtatgagattgatgccagcctcttggcagaagctggtaaaagctttggtctaatcatgactccaccagataaatctgcggagtttgtcaaattaacctgggataacgtgacctttttgaagaggaagttcgtgcgtgatgcacggtaccctttccttgtacatccggtcatggacatgtcgaacatccatgagtccattcggtggacgaaagatcccaggcatactgaagaccatgtccgctcactttgcctattggcctggcattgtggcgaggaagaatacaacgaatttgttacaaagatccgttccgttcctgtcgggagagccctccatctaccttcattcaaggcgctcgagaggaaatggtacgactctttctgaattgccaacttgatgatccgctttaattagcttcaatttggccctaatacacccaccggatggggtgt

SEQ ID NO: 9 - DNA, 7363 bp, Enterovirus Enterovirus 71
tacccactcacagggcccactgggcgttagcactctggtactaaggtacctttgtgcgcctgttttaactccctccccctgaagtaacttagaagcagtaaactaatgatcaatagtgggcatgacataccagccatgtctcgatcaagcacttctgtttccccggactgagtatcaataggctgctcgcgtggctgaaagagaaaacgtccgttacccggccagctacttcgagaagcttagtaccatcatgaacgaagcagagcgtttcgctcagcacaatcccagtgtagatcaggctgatgagtcactgcaaaccccatgggcgaccatggcagtggctgcgttggcggcctgcccatggagaaatccatgggacgctctaattctgacatggtgcgaagagcctattgagctagctggtagtcctccggcccctgaatgcggctaatcctaactgcggagcacgcacccacaaaccagtgggcagtgtgtcgtaatgggtaactctgcagcggaaccgactactttgggtgtccgtgtttccctttattcttatattggctgcttatggtgacaatcaaagagttgttaccatatagctattggattggccatccggtgtgtaacagagcaattgtttacctattcattgggtttgtaccactgacgttgaagtctgtgaccacactcaactttatcctgaatctcaatacagtaaaacatgggctcacaggtgtccacacaacgctccggctcgcatgaaaactctaactcagctactgagggttctaccataaactacactaccattaattactataaagactcctatgccgccacagcaggtaaacagagccttaagcaggacccagacaagtttgcaaatcctgttaaggatattttcactgaaatggcagccccactaaaatccccatccgctgaggcatgtggatacagcgatcgagtagcgcagttaactatcggcaactccaccatcactacgcaagaagcagcaaacattatagttgggtatggtgagtggccctcctactgctcggattctgacgctacggcggtggataaaccgacgcgcccagatgtgtcggtgaatagattctacacattggacaccaaattgtgggagaaatcgtccaaaggatggtattggaaattcccggatgtgttaacagaaactggggtctttggccaaaatgcacaattccactatctctatcggtcagggttctgtattcacgtgcaatgcaatgctagtaaattccaccaaggagcgctcttagttgctgtcctcccagagtatgtcattgggacggtggccggaggcacaggaacggaggatagtcaccccccttacaagcaaacccaacccggcgctgatggctttgagctgcaacacccgtacgtgcttgatgctggtatcccaatatcacaattgacagtgtgcccacaccaatggattaacttgaggactaataattgtgccacaataatagtgccgtacataaacgcactgccctttgactctgctctgaaccattgcaactttggcttattggtcgtgcccattagcccgttagactttgatcaaggagcgacgccggtgatccctatcaccatcacattggctccaatgtgttctgaatttgcaggtcttaggcaagcagtcacgcagggatttcccactgagctaaaacctggcacgaaccaatttttgactactgacgacggtgtttcagcgcccattttgccaaattttcaccccactccatgtattcacatacctggtgaagttaggaacctgttagagttgtgtcaggtagaaaccattttagaagtcaataacgtgcccacgaatgccaccagcttaatggagagactgcggtttccggtctcagcccaagcgggtaagggtgagttgtgtgcagtgttcagagccgatcctggacggagtgggccatggcagtctactttattgggccagttgtgcgggtactacactcaatggtcaggatcactagaagtcacttttatgtttactgggtcctttatggccactggcaagatgcttatagcctacacaccaccgggaggtcccctacctaaggaccgggcgaccgccatgttgggtacgcatgtcatttgggatttcggactacaatcgtctgttactcttgtgataccatggattagcaacacccactacagggcacatgctcgagatggagtgtttgactactatactacaggcttggttagtatatggtatcagacgaattatgtagttccaattggggcacccaacacagcctatataattgcattagcagcagcccagaagaatttcaccatgaagttatgcaaagatgccagtgatatcctgcagacaggcactatccagggagacagggtagcggatgtgattgaaagctctataggggacagcgtgagcagagccctcactcaagccctaccggcacctacaggtcagaacacgcaggtaagcagccaccgactagacactggtaaagtcccagcacttcaagccgctgagattggagcatcgtcaaatgctagtgatgagagcatgattgagacacggtgtgttcttaattcgcacagcacggctgaaaccactcttgacagcttctttagcagagcggggttagttggagagatagacctccctcttgaaggtacaactaacccgaatggttatgcaaactgggatatagacataacaggttatgcgcaaatgcgcaggaaggtggagttgtttacttacatgcgctttgacgcagagttcactttcgtcgcgtgcacgcctactggggaagttgtcccgcagttactccaatatatgtttgtgccaccaggggctcctaagccagattccagagaatcccttgcatggcaaactgccaccaatccctcagtttttgttaagttgtcagatcccccagcacaggtttcagtcccattcatgtcacctgcgagtgcctatcagtggttctatgacggatatcccacattcggtgaacacaagcaagagaaagaccttgaatacggggcatgtccaaacaacatgatgggcacgttctcagtgcggaccgtcggaacctcgaagtccaagtaccctttagttattagaatttacatgaggatgaagcatgttagggcgtgggtacctcgtccaatgcgcaaccagaactatttattcaaagctaacccaaattatgctggtaattccatcaagccaaccggtgccagtcgcacggcgatcactactcttgggaaatttggacaacaatccggggctatttacgtgggcaacttcagagtggtcaaccgccatcttgcctctcacaatgactgggcgaaccttgtctgggaagatagttctcgtgacttgcttgtgtcatctaccaccgctcaaggttgtgatacgattgcccgttgcaattgtcaaacaggagtgtactattgtaattcaaagaggaagcactacccagtcagtttctcaaaacccagtttgatctttgtagaggccagtgagtattacccagccaggtatcagtcacatcttatgcttgcagttggccactcagaaccaggagattgcggtggtatacttagatgccaacacggtgtcatagggatagtctccactgggggaaatggcttggtagggtttgctgatgtgagggatcttttgtggttggatgatgaagccatggagcaaggcgtatcagattacattagggggcttggtgatgctttcggtatgggattcacggacgcggtgtcaagagaggttgaagctttaaagaaccatttgatcggttcagaaggcgctgtggagaagatcctcaagaacttagtgaaactcatctctgctcttgttattgtcatcaggagtgactatgatatggtcacattgacggcaacacttgccctgatcgggtgtcatgggagcccttgggcctggatcaagtcaaaaacggcgtcaattttgggcataccaatggcccaaaaacagagcgcatcatggttgaagaaattcaacgatgcagcaagcgccgctaagggtcttgagtggatctccaacaaaattagtaagtttatcgattggctcaaagagaaaatcatccccgctgctagagaaaaagtggaatttctaaacaacctaaagcaacttcccttactggagaatcaaatttccaatctcgaacagtcagctgcttcacaggaagacctcgaagcaatgtttggtaacgtgtcttacctggcccatttttgccgcaaattccagcctctctatgccacagaagcaaagagggtgtatgctctagagaagagaataaataattacatgcagttcaagagcaaacaccgtattgaacctgtatgtttgatcatcagaggctcacctggtactgggaagtctctggcaacagggatcatcgctagagctatagcagacaagtatcactctagtgtgtattccttacctccagacccagatcatttcgacgggtacaaacaacagatcgtcacagtaatggacgacctttgccagaacccggatgggaaagacatgtcactattttgtcagatggtttccacagtggattttataccgcctatggcgtctctagaagaaaagggggtatcgttcacttccaagtttgtaattgcctccactaatgctagtaatatcatagtaccaacagtctcggactcagacgccatccgtcgtcgattctttatggattgcgacattgaggtgaccgactcttacaagacagacctaggcaggcttgatgcgggaagggccgctaggttgtgctctgaaaataacaccgcaaatttcaagcgttgcagtccactagtgtgcggaaaggccatccagctcagagatagaaagtctaaagtgaggtacagcgtggacacggtggtgtctgagctcatcagagagtacaacaacagatcaaccattggcaacactattgaagctctcttccaagggccccctaaatttaggccgataagaattagcctagaagagaaacccgcgcccgacgctattagtgacttactggccagtgtagacagtgaagaagttcgccagtattgcagggaccaaggatggattgtgccagatactcctaccaatgtggaacgtcatctgggcagggcagttttaattgtgcagtctatagctactgtagtagcagtagtatcccttgtctatgtcatttacaagttgttcgctggcttccaaggggcgtattctggcgcccccaagcagacacttaagaagccggtactacgcacagctactgtgcagggaccgagcttggactttgctttgtccttacttagaagaaacatcagacaggtccagactgatcagggtcattttaccatgctaggggtgcgagaccacctagctgtactccccagacattcacaaccagggaaaaccatttggattgaacacaaactggtgaggatcgtggatgccgtggagttggtggatgagcaaggagttaatttagaactgacactagtgacgcttgacaccaatgaaaaatttagggacattacaaagtttataccagagactattagtccagctagtgacgccactttggttatcaataccgaacacatgcctagcatgtttgtgccaattggtgatgtggtccaatacgggttcttaaacttaagtggcaagcccactcaccgcactatgatgtacaacttccctacgaaagcagggcagtgcggtggtgttgtgacagcagtaggcaaagtgattgggattcacatcggtggcaacggtaggcaaggcttttgtgctgctctcaagagaggatacttctgtagtgaacaaggtgaaatccaatgggtgaagcctaataaggagactggtaggctgaacatcaatggcccaactcgcaccaagttagaaccaagcgttttccatgatgtgtttgaaggcaccaaggaaccagcagtattgtccagcaaagatcctagattggaagtggacttcgagcaagcgctgttttcaaagtatgtggggaacacattatacgaacctgatgagttcgttagagaggcagccctacattatgctaaccaactcaagcaattagacataaagactacaaagatgagcatggaagatgcttgctacggcacagagaatctagaagccatagatctccatacaagtgcaggatatccatacagtgctctaggcatcaagaagagagacatcctggatccagtcactcgtgacgtcagcaaaatgaagttctatatggataagtatggtttggacttgccttactccacatatgtcaaagatgagctcagggctttagataaaattaagaaagggaaatcccgccttatagaagcgagcagtctgaacgactcggtgtatttgaggatggcctttggacatctctatgagacttttcatgccaacccaggtacggtcactggctcagctgtcgggtgtaacccggatgtgttctggagtaagctcccaatcttgctcccagggtcactttttgcatttgattactcagggtatgatgccagccttagcccggtgtggtttagagcgctagagatagtcttgcgggaaattggttattcagaagatgcagtttctctcatagaaggaattaaccacactcaccacgtgtatcgcaataagacctattgcgttctcgggggaatgccctcaggctgctcaggcacttccatctttaactctatgattaataatatcatcattagaacacttttgattaagacattcaaaggaatagatctagatgagctgaatatggtggcctatggggatgatgtattggctagttacccttttcctatcgattgctcagagctggcaaagacaggcaaggagtatggattgaccatgacacctgctgacaaatcaccctgttttaatgaagtcacatgggaaaatgccactttccttaagagaggatttttgcctgatcatcaatttccattcttgatccatcccaccatgcctatgagagagatccatgaatccatccgctggaccaaagatgcgcgaaacacgcaagaccacgtgcgttctctctgcctgctagcgtggcataatgggaaagaagaatacgaaaaatttgtgagcacaattaggtcagttccagttggaaaagcattggccataccaaactttgagaatttgagaagaaattggctcgaattgttttaaacttacagtttacaactgaaccccaccagaaatctggtcgtgttaatgactggtggg

SEQ ID NO: 10 - DNA, 7397 bp, Enterovirus Echovirus
ttaaaacagcctgtgggttgttcccacccacagggcccactgggcgttagcacactggtatcacggtacctttgtgcgcctgttttatactcccccccctaaggaaactttagaagcaaagcaattgtgatcaatagtgggtatggcacaccagtcatatcttgatcaagcacttctgttcccccggacttagtaccaatagactgctcaagcggttgaaggggaaaacgttcgttatccggccaactacttcgagaaacctagtagcaccatgaaagttgcggagtgtttcgctcagcacttcccccgtgtagatcaggctgatgagtcaccgtattccccacgggcgaccgtgacggtggctgcgttggcggcctgcccatggggtaacccatgggacgctctaaaacagacacggtgcgaagagtctattgagctagttggtagtcctccggcccctgaatgcggccaatcctaactgcggagcacatactcccaatccagggagcagtgtgtcgtaatgggtaactctgcagcggaaccgactactttgggtgtccgtgtttccttttattctcacattgactgcttatggtgacaattgaaagattgttaccatatagctattggattggtcatccggtgagcaatagagctattgtttatcaatttgttggatttgtaccactcaacttttctgttttgagaacactcaactacatcttactgctaaacacatcaaaatgggagcacaggtatcaacacagaagaccggggcgcacgagactagcttgagcgctactggcaactccataatacactacacgaatattaattattacaaagatgcagcctctaactctgccaatagacaagatttcacccaagaccctggtaagtttactgaaccaatgaaagatgtcatgataaaaaccctgccagcgctgaattctccaacggttgaagagtgcgggtacagtgacagggtcaggtcaatcacacttgggaactccactattacaactcaagagtgtgccaatgtggtggtggggtacggtgaatggcctgagtatctgagtgataacgaggcaactgctgaggaccaaccaacgcagccggacgtggccacttgccgtttttacaccctagactcagtccaatgggagaatgggtcaccaggttggtggtggaagtttcccgacgctctaagggatatgggattatttggccaaaatatgtactaccattacttaggcagagccgggtataccatccacgtacaatgcaatgcttccaagtttcatcaaggctgtatcctggtagtgtgtgtccctgaggcggagatgggaagtgcccaaacctcaggggtggtcaactacgaacacattagtaagggtgagatcgcatcaaggttcactaccacgacaacagcagaagaccatggcgtgcaggccgcggtatggaatgctggtatgggcgttggagttgggaacttgacgatcttcccgcaccaatggatcaaccttcgcaccaacaacagcgccacaattgttatgccatacgtaaatagtgtaccaatggacaatatgtatagacatcacaactttacactaatgataataccctttgtgcctctggatttcagcgcgggtgcatccacatacgtgcccataacggtgacagtggcccccatgtgtgccgagtacaatggactacgactagctggacaccaaggactaccgaccatgaacacccctggcagcaaccaatttcttacatcggacgatttccaatccccgtcagcgatgcctcaatttgatgtaactccagaaatgcacatccctggtgaggtgcgcaacctcatggaaattgccgaagttgattctgtaatgccaattaacaatgatagcgccgcaaaagtttcatccatggaggcttatagagtcgaattgagcaccaacactaatgccgggactcaagtgtttggctttcaactgaaccccggagcggaatcagtaatgaaccgcacattaatgggtgaaatcctaaattactacgcacactggtcaggaagcataaagataacattcgtgttctgtggttctgccatgaccactggcaagtttctgctgtcttacgccccaccaggtgcaggtgcgccaaaaactcgcaaggatgccatgttaggcactcatgtggtgtgggatgttgggctccaatccagctgcgtgttatgcatcccctggattagtcaaacccattacagatttgtggaaaaggatccatacaccaatgccgggtttgtgacatgttggtatcagaccagtgtagtgtccccagcgagcaaccagccaaagtgttatatgatgtgcatggtttctgcgtgtaatgacttctcagttcgcatgttgagagataccaagttcattgagcaaacatctttttaccaaggtgatgtgcagaatgctgtcgaaggggctatggtcagggtggcagatacagtgcaaacttcagccacaaactcagagagggtgcctaacttgacagcagtagaaactggtcacacttcgcaggcagtacctggtgataccatgcagactagacatgtgatcaacaatcacgtgaggtcagaatctacaattgagaacttccttgccagatcagcgtgtgttttctacctagagtacaagacagggaccaaagaggattccaatagcttcaacaattgggtgattacaaccaggcgagtggctcaactacgtagaaaactggaaatgtttacttacctacggtttgacatggaaatcaccgtggtcattacaagctcgcaagatcagtctacatcacaaaaccagaatgcaccagtgctaacacaccagataatgtatgtaccaccagggggacccatacccgtaagcgtggatgattacagctggcaaacatccaccaaccccagtatcttttggaccgaagggaacgctccggcacgcatgtcaattccatttattagcataggcaatgcgtatagtaatttctacgatgggtggtctcacttctcccaggctggcgtgtatggcttcactactctgaacaacatgggtcaattgttcttccggcacgtaaacaagcccaacccagccgctattacaagtgtggcgcgcatttacttcaaaccgaaacatgtacgcgcttgggtgcctagaccaccgcgcttgtgtccatacatcaatagcacgaatgtcaactttgaacccaagccagtgactgaagtacgtaccaacataataacaacgggtgcctttgggcagcaatctggcgcagtgtacgtgggcaactacagagtggtcaataggcacttggcgactcacattgattggcaaaactgtgtatgggaggactataacagggatctactggtcagcacaactacagctcatgggtgcgacaccatagctaggtgccagtgcacgacaggggtgtacttctgcctgagcagaaacaaacactacccagtgtcatttgaaggtccaggattggttgaggttcaagagagtgagtattacccaaaaaggtaccaatcccacgtgcttcttgcagccggattttctgaacctggagattgtggtggtatcttgaggtgtgagcatggtgttattggtatagtgaccatgggaggtgaaggtgtcgttggtttcgccgatgtgcgagaccttctatggctagaggatgacgccatggagcagggagtcaaggactacgtggaacagctcggcaacgcctttggttcaggtttcaccaatcagatttgtgagcaggtcaatctcctgaaagagtccttggtaggtcaagactccatcttggaaaagtctttaaaagcactagtaaaaatcatatcagcattagtgatcgtggtaaggaaccacgacgacttgatcacagtgactgctacactagccctcattggctgcacctcttcaccatggcgatggctcaagcagaaggtatcacaatattatggaatacccatggccgagcgtcagaacaatggatggctcaagaaattcactgagatgactaacgcctgcaaaggcatggagtggattgccattaaaattcagaaatttattgaatggctgaaagttaagattctacctgaagtaaaagaaaaacatgaatttctcaatagattaaaacagctgccacttcttgaaagtcagattgctaccatagaacagagcgcaccatcacaaggtgaccaagaacagctcttctccaatgtgcagtattttgcccactattgcagaaagtacgcacctctgtatgccgccgaagcaaaaagagtgttctcgttggagaaaaagatgagcaactacatacagttcaagtccaaatgccgtattgagcctgtatgtttacttctccatggcagcccaggagcggggaaatccgtggctacaaacctaattggtagatccctcgcggagaaacttaacagctctgtgtactcgttaccaccagacccagatcattttgatggatacaaacaacaagccgtagtgatcatggatgacctgtgccagaatccagatgggaaggatgtgtcactattctgtcaaatggtatccagcgtggacttcgtaccacccatggcagctctggaggagaaagggattcttttcacgtccccgtttgtgctagcatcaaccaatgcggggtctatcaatgcacccactgtgtctgacagcagggcacttgccagaaggttccactttgatatgaacatcgaggtgatctccatgtatagccagaatgggaagattaacatgcccatgtctgtcaaaacatgtgatgaggattgctgcccggtcaatttcaagaaatgctgcccgctggtgtgtggtaaggccattcaatttattgacagaaagacccaagttaggtattcactggacatgttggtcaccgagatgttcagggagtacaaccacagacacagcgtgggtgccaccctcgaggctttgttccaagggccaccggtctacagggagattaagatcagtgtcgctccagaaacaccccctccaccagcaatcgctgacctgctaaaatcagtagacagtgaggcagtaagggagtactgcaaggaaaaaggctggcttgtgccggaaattagctccaccctacagattgagaagcacgtcagtagagcatttatctgcctacaggctctgactacatttgtctcagtagctggcataatctacattatctacaaattgtttgccggttttcagggcgcgtatacggggatgccaaatcagaaacccaaggtgcccactctgagacaggctaaggtgcagggcccggcattcgagttcgccgtggcgatgatgaagagaaacgccagcacagtgaaaacagaatatggtgagttcaccatgctcggcatctatgacagatgggcagtgttaccacgccacgccaagcccggaccgaccatcttaatgaatgatcaggaggtcggtgtgctagatgccaaagaattggttgacaaagatgggacaaatctggagttgactctcctaaagctcaatcgcaatgagaagtttagggatatcagagggtttctggcaagagaagaagctgaggtgaatgaggctgttttggcaataaacacaagcaagttccccaacatgtacatacccgtaggtcaagtcaccgactacggttttctgaacttgggaggaacgcccacaaagaggatgctcatgtacaatttcccaactagagcaggccaatgtggcggtgtcctcatgtcaacagggaaggttctaggaatacatgtaggcggaaatggacaccaaggattctctgctgccctccttagacattacttcaatgaggaacaaggtgagatagaattcattgagagctcaaaggacgcaggcttccctgtgatcaacacccccagcaaaaccaagctggaaccaagcgtgtttcaccaggtgtttgagggcaacaaagagccggcagtgcttagaaatggggatccacgactcaaggtcaactttgaggaggcaatcttctccaagtacattggcaatgttaacacccacgtggacgaatacatgcaagaggccgtggaccattatgcagggcagctagctacactggacatcagcacagagcccatgaaactggaggatgccgtgtatggtacagaggggctggaagcactagacctaaccaccagtgcaggctatccgtacgtggccctaggtatcaagaaaagagacattctctctaagaagaccaaagaccttaccaagttgaaggaatgcatggacaagtatggcctaaacttaccaatggtaacttacgtcaaagatgaattaagatctgccgagaaggtagccaagggaaagtccagacttattgaggcctccagtctcaatgactcagtagcaatgaggcaaacatttggaaacctgtacaaaacctttcatctcaatccgggcattgtcacgggcagtgctgttgggtgtgacccagatgtattttggagtaagatccctgtcatgcttgatggacatctcatagcttttgactattcaggttatgacgccagtctcagcccggtgtggtttgcatgtctgaaactcctcctagagaaactagggtatacgaataaggaaacaaactacatagattacctctgcaactctcaccacttatatagggacaagcactactttgtgagaggcggtatgccatcaggatgttcgggcactagcatatttaattccatgattaacaacattataatcaggactctcatgctgaaagtttataaaggcattgatttggaccaattcagaatgatcgcttatggggatgatgtgattgcctcctacccgtggcccatcgatgcgtcactgttagctgaagcaggaaaagattatggattgatcatgaccccagcagacaaaggtgagtgctttaatgaggtaacctggacaaatgtgacctttttgaaaaggtacttcagagcagatgaacagtacccattcctggtccatcctgttatgccaatgaaggacatacatgagtccattagatggactaaagaccccaaaaacacacaggatcacgtgcgctcgctgtgcctattggcttggcacaacggggagcacgaatatgaggagtttattcgcaagatcagaagcgtgcccgtcgggcgctgcttgacccttcctgcattttcgacactgcgtaggaagtggttggactccttctaaaattagagcacaattagtagattaaattggcttaaccctaccgcatgaaccgaacttgataaaagtgcggtaggggtaaattctccgcattcggtgcgg

SEQ ID NO: 11 - DNA, 8179 bp, Aphthovirus Foot-and-mouth disease virus
ttgaaaaggggcgctagggtctcacccctagtataccaccggcagctcctgcgttgcactccacacttacgcccgtgcactcgcgggaaccgatggactgtcgttcacccacctacagctggactcacggcaccgcgtggtcattttagctggattgtgcggacgaacaccgcttgcgcatctcgcgtgaccggtcagtactcttaccaccttccgcctacttggtcgttagcgctgtcttgggcactcctgttgggggccgttcgacgctccacggtttcccccgtgtgacggactacggtgatggagccgcctcgtgcgagttggtcgtctggtgtgctttggctgtcacccggcgcccgcctttcatttttaccgtcgttcccgacgttaaagggatgaaaccacaagcttgaaaccgtcttgcccgacgttaacgggttgtgaccacacgcttgtaccgcctttcccggcgttaatgggatgtaaccacaagataaaccttcatccggaagtaaaacggcaatcacactcagttttgcccgttttcatgagaaacgggacgtctgcgcacgaaacgcgccgtcgcttgaggaagacttgtacaaacacgatctatgcaggtttccacaactgacacacaacgtgcaacttgaaactccgcctggtctttccaggtctagaggggtgacactttgtactgtgcttgacaccacgctcggtccactagcgagtgttagtaacaacactgttgtttcgtagcggagcatgatggccgcgggaactcccccttggtgacaaggacccgcggggccgaaagccacgtcctaacggacccatcatgtgtgcaaccccagcacggcaactttattgtgaaaaccactttaaggtgacactgatactggtactcaatcactggtgacaggctaaggatgcccttcaggtaccccgaggtaacaagcgacactcgggatctgagaaggggactggggcttctttaaaagcgcccagtttaaaaagcttctacgcctgaataagcgaccggaggccggcgcttttctgttaaaccactactaactcaatgaacacaactgactgttttatcgctctgttacacgctctcagagagatcaaaacactgtttctttcacggacacgaggaaaaatggaattcacactttacaacggtgagaaaaagaccttctattctaggcccaacaaccacgacaattgttggttgaacaccatcctccagttgttcaggtatgtcgatgaacctttcttcgactgggtctatgagtcgcccgagaacctcactcttgaggcgattgggcaactcgaggaactcactggtcttgagctgcacgaaggcggaccacccgctctcgtcatttggaacatcaaacacttgctccacaccggaatcggcactgcttcgcgacccagcgaggtatgcgtggttgacggtacggacatgtgcttggcggacttccacgctggcattttcctgaaaggacaagagcacgctgtgtttgcttgcgtcacctccaacgggtggtacgcgatcgatgacgaagacttttacccctggacgcctgacccgtcagacgttttggtgtttgtcccgtacgatcaagaaccactcaacggagaatggaaagcaaaggttcagaaacggctcaaaggagccgggcaatccagcccggcgactgggtcacagaaccaatcaggcaacacgggaagtatcatcaacaactactacatgcagcaataccaaaactccatggacacacaacttggtgacaacgctattagcggaggctccaatgaaggttccactgacacaacttctacacacacaagcaacacccaaaacaatgattggttttcgcgcctggctagctccgccttcagcgggctgttcggcgcgcttctggctgacaagaaaacggaagagacaactctgcttgaagaccgcattcttaccaccaggaacggccacacaacgtcgacgacacagtcgagcgtcggcgtgacgtatggttatgctgtggctgaggatgcggtgtcagggcctaacacctcaggcctggagacccgcgttcaccaagcggaacggttcttcaagaagcacttgtttgactggacaccgaatttggcatttggacactgtcactacctggagcttcctactgaacacaaaggggtgtacggcagtctcatggactcgtacgctacaatgaggaacggctgggacattgaggtgaccgccgttggaaaccaattcaacggcggttgtctcctcgtcgcacttgtgccagagctgaaggagcttgacacgcggcagaaataccagctgacactcttcccccaccaattcatcaacccacgcaccaacatgacggctcacatcaacgtgccgttcgtgggtgtcaacaggtacgaccagtacgcgctccacaagccgtggacgctcgttgtgatggtagtggctccactcaccgtcaaaactggtggttctgaacaaatcaaggtttacatgaatgctgcgccgacccacgtgcacgtggcaggcgaactgccctcgaaagaggggatagtacccgttgcatgcgcggacggttatggcaacatggtgaccactgacccaaagactgctgacccagtgtacggaaaagtgtacaacccccccaggacgaacctccctgggcgcttcacaaacttccttgatgtcgcggaggcttgcccaactttcctccgcttcggagaggtgccatttgtgaagacagtgaattctggtgaccgtttgctggccaagtttgatgtctcgcttgctgcggggcacatgtctaacacctacttggccggcctggcgcagtactacacacagtacagtggtaccatgaatgttcacttcatgttcactgggcctacggacgccaaggctcgttacatggtggcatacatcccccccggcatgacaccgccaactgaccccgagcgcgccgcccactgcattcactctgagtgggacactggtcttaactccaagttcaccttttccataccctacctctctgctgctgactatgcgtacactgcttctaacacggcggagaccacaagtgtgcaaggttgggtgtgcatctaccagatcacccacggcaaggctgaaggagacgccctggttgtttctgtcagtgccggcaaagattttgagttccgcttgcctgtcgacgcacgccggcaaaccaccacaaccggcgagtcggcggacccggtaacaaccacggttgagaactacggaggagaaactcagacggccagacggctccacactgacgttgccttcgttctcgacaggtttgtgaaactcactgcacccaagaacgctcagaccctcgacctcatgcagatcccctcacacacgctggtcggggcactgcttcggtctgcgacgtactacttctcagacctggaggttgcgcttgttcacacaggcccggtcacctgggtgcccaacggctcacccaaggacgccctggacaatcagaccaacccaactgcctaccagaaacagcccatcacccgcctagcactcccctacaccgccccccatcgcgtgctggcaacagtgtacaacgggaagacgacgtacggggaaacgccctcacggcgcggtgacatggcagcccttacacagagactaagcgagcggctgcccacctccttcaactacggcgctgtaaaggctgaaaccatcactgagctcttgatccgcatgaaacgcgcggagacatactgccccagacctctgttggctcttgacaccacccaagaccgccgtaaacaggagatcattgcacctgagaagcaggtattgaacttcgacctgctcaagttggcaggggacgttgagtccaaccctgggcccttcttcttctccgacgtgaggtcgaacttctcgaaactggtagacaccatcaaccagatgcaggaggacatgtcaacaaaacacggacccgactttagccggttggtgtccgcatttgaggaattggccactggagtgaaagctatcagaactggtctcgacgaggccaaaccctggtacaagctcattaaactcctgagccgcctgtcgtgcatggccgctgtagcagcacggtcaaaggacccagtcctcgtggccatcatgttagctgacaccggtctcgagattctggacagcacctttgtcgtgaagaagatctccgactcgctctccagtctctttcacgtgccggcccccgtcttcagtttcggagccccgatcctgttggctgggttggtcaaagtcgcctcgagtttcttccggtccacacctgaagaccttgagagagcagagaaacagctcaaagcacgtgacatcaatgacatcttcgccattctcaagaacggcgagtggctggtcaagctgatccttgctatccgcgactggatcaaagcatggattgcctcagaagagaagtttgtcaccatgacagacttggtgcctggcatccttgaaaagcagcgggacctcaacgacccaagcaagtacaaggaggccaaggagtggctcgacaacgcgcgccaagcgtgcttgaagagtgggaacgtccacattgccaacctttgcaaagtgaccgccccggcacccagcaagtcgagacccgaacctgtggtcgtttgcctccgtggtaagtctggccagggaaagagtttccttgcgaacgtgctcgcacaagcaatttccacccacttcactggcagaaccgactcagtttggtactgcccgcctgaccccgaccacttcgacggttacaaccagcagactgtcgttgtgatggacgatttaggccagaaccctgacggcaaggacttcaagtactttgcccagatggtttccaccacagggttcatcccgcccatggcctcactcgaagacaaaggtaaacctttcaacagcaaggtcatcattgcaacaaccaacctgtactcggggtttactccgagaaccatggtgtgccctgatgcactgaaccgtaggtttcactttgacattgacgtgagtgccaaagacgggtacaaaattaacaacaaattggacatcatcaaagctcttgaagacacccacaccaatccagtggcaatgtttcagtacgattgtgcccttcttaacggcacggccgttgaaatgaagagaatgcaacaagatatgtttaagcctcaaccacccctccagaacgtgtaccaactagtccaggaggtgattgaacgggttgagctccacgagaaagtgtcgagccacccgatctttaagcaaatctcgattccttcccaaaaatctgtgttgtactttctcattgagaaaggccagcacgaagcagcaattgacttctttgaggggatggtgcatgactccatcaaggaggagctccgacccctcatccaacagacatcatttgtgaaacgcgcttttaagcgcctaaaggaaaactttgagattgttgccctgtgtttgactcttttggcaaacatagtgatcatgatccgcgagactcgcaagagacagcagatggtggacgatgcagtgaatgagtacattgagaaagccaacatcaccacagatgacaagactcttgacgaggcggaaaagaaccctctggagaccagtggtgccagcaccgttggtttcagagagagaactcttccaggacacaaggtgagtgatgacgtgaactccgagcccaccaaacctgtggaagagcaaccacaagctgaaggaccctacaccgggccacttgagcgtcagaaacctctgaaagtgcgcgccaaactgccacagcaggagggaccctacgctggcccgatggagagacagaaaccactgaaggtgaaagcaaaagccccggtcgttaaggaaggaccttacgagggaccggtgaagaagcctgttgctttgaaagtgaaagctaagaacttgattgtcactgagagtggtgccccaccgaccgacttgcaaaagatggtcatgggcaacacaaagcctgtcgagctcattcttgacgggaagacagtagccatctgctgtgctactggggtgtttggtactgcctacctcgtgcctcgtcatcttttcgcagagaagtatgacaagatcatgttggacggcagagccatgacagacagtgactacagagtgtttgagtttgagattaaagtaaaaggacaggacatgctctcagacgccgcgctcatggtgctccaccgtgggaatcgcgtgcgggacatcacgaagcacttccgtgatgttgcaaggatgaagaaaggcacccccgttgttggcgtgatcaacaacgctgatgttgggagactgattttctctggtgaggccctcacctacaaggacattgtagtgtgcatggatggagacaccatgcctggcctctttgcctacaaagccgccaccaaggctggttactgtggaggagctgttctcgcaaaggacggagccgagactttcatcgtcggcactcactctgcagggggcaatggagttggatactgctcatgcgtctccaggtccatgcttctcaagatgaaggcacacatcgacccagaaccacaccacgaggggttgattgttgataccagagatgtggaagaacgcgtccacgtgatgcgtaaaaccaagcttgcgcccaccgtcgcacacggtgtgttcaaccctgcgtttggccccgctgccttgtctaacagggacccgcggctaaacgaaggcgttgtcctcgatgaagtcatcttctccaagcacaaaggggacacaaagatgacagaggaagacaagaagctgttccggcgctgtgctgctgactacgcgtcacgcctacactccgtgctgggtacggcaaatgccccactgagcatctacgaggcaatcaaaggtgttgacggactcgacgccatggaaccagacactgcgcctggtctcccctgggccctccaggggaagcgccgtggtgccctgatcgacttcgagagcggcacggttggacccgaaattgaggctgccttggagctcatggagaaaagagagtacaagtttgcttgccagaccttcctgaaggacgaaattcgcccgatggagaaagtgcgtgccggcaagactcgcattgtcgatgttttgcccgttgaacacattctttataccaggatgatgattggcagattttgtgctcaaatgcactcaaacaacggaccgcaaattggctcggcggtcggttgcaaccctgatgttgattggcaaagatttggcacccattttgctcagtacagaaatgtgtgggatgtggattactcggcctttgatgctaaccactgcagtgatgcaatgaatatcatgtttgaggaggtgttccgcacggaatttggtttccaccccaatgcagagtggattctgaagactctcgtgaacacggagcatgcctatgagaacaaacgcatcgttgttgagggcgggatgccgtctggctgttccgcaacaagcatcatcaacacaattttgaacaacatctacgtgctctacgccctgcgtagacactatgagggagttgagctggacacttacaccatgatctcctacggagacgacatcgtggtggcaagtgattacgatctggacttcgaggctctcaagcctcacttcaaatctctgggccaaaccatcactccagctgacaaaagtgacaaaggttttgttcttggtgactccatcaccgacgtcactttcctcaaaagacacttccacatggattatggaactgggttttacaaacctgtgatggcttcgaagaccctcgaagctatcctctcctttgcacgccgtgggaccatacaggagaagttgatttccgtggcaggactcgcagtccactctggacctgatgagtaccggcgtctcttcgaacccttccagggcctctttgagattccaagctacagatcactttacctgcgttgggtgaacgccgtgtgcggtgacgcataatccctcagagatcacactggcagaaagactctgaggcgagcgacgccgtaggagtgaaaagcccgaaaggctttttctcttcccgcttcctatctccaaaaaaaaaaa

SEQ ID NO: 12 - DNA, 7310 bp, Senecavirus Seneca Valley virus
tttgaaatggggggctgggccctgatgcccagtccttcctttccccttccggggggttaaccggctgtgtttgctagaggcacagaggggcaacatccaacctgcttttgcggggaacggtgcggctccgattcctgcgtcgccaaaggtgttagcgcacccaaacggcgcacctaccaatgttattggtgtggtctgcgagttctagcctactcgtttctcccccgaccattcactcacccacgaaaagtgtgttgtaaccataagatttaacccccgcacgggatgtgcgataaccgtaagactggctcaagcgcggaaagcgctgtaaccacatgctgttagtccctttatggctgcaagatggctacccacctcggatcactgaactggagctcgaccctccttagtaagggaaccgagaggccttcgtgcaacaagctccgacacagagtccacgtgactgctaccaccatgagtacatggttctcccctctcgacccaggacttctttttgaatatccacggctcgatccagagggtggggcatgacccctagcatagcgagctacagcgggaactgtagctaggccttagcgtgccttggatactgcctgatagggcgacggcctagtcgtgtcggttctataggtagcacatacaaatatgcagaactctcatttttctttcgatacagcctctggcacctttgaagatgtaaccggaacaaaagtcaagatcgttgaataccccagatcggtgaacaatggtgtttacgattcgtctactcatttggagatactgaacctacagggtgaaattgaaattttaaggtctttcaatgaataccaaattcgcgccgccaaacaacaactcggactggacatcgtgtacgaactacagggtaatgttcagacaacgtcaaagaatgattttgattcccgtggcaataatggtaacatgaccttcaattactacgcaaacacttatcagaattcagtagacttctcgacctcctcgtcggcgtcaggcgccggacccgggaactcccggggcggattagcgggtctcctcacaaatttcagtggaatcttgaaccctcttggctacctcaaagatcacaacaccgaagaaatggaaaactctgctgatcgagtcacaacgcaaacggcgggcaacactgccataaacacgcaatcatcattgggtgtgttgtgtgcctacgttgaagacccgaccaaatctgatcctccgtccagcagcacagatcaacccaccaccactttcactgccatcgacaggtggtacactggacgtctcaattcttggacaaaagctgtaaaaaccttctcttttcaggccgtcccgcttcccggggcctttctgtctaggcagggaggcctcaacggaggggccttcacagctaccctacatagacactttttgatgaagtgcgggtggcaggtgcaggtccaatgtaatttgacacaattccaccaaggcgctcttcttgttgccatggttcctgaaaccacccttgatgtcaagcccgacggtaaggcaaagagcttacaggagctgaatgaagaacagtgggtggaaatgtctgacgattaccggaccgggaaaaacatgccttttcagtctcttggcacatactatcggccccctaactggacttggggtcccaatttcatcaacccctatcaagtaacggttttcccacaccaaattctgaacgcgagaacctctacctcggtagacataaacgtcccatacatcggggagacccccacgcaatcctcagagacacagaactcctggaccctcctcgttatggtgctcgttcccctagactataaggaaggagccacaactgacccagaaattacattttctgtaaggcctacaagtccctacttcaatgggcttcgcaaccgctacacggccgggacggacgaagaacaggggcccattcctacggcacccagagaaaattcgcttatgtttctctcaaccctccctgacgacactgtccctgcttacgggaatgtgcgtacccctcctgtcaattacctccctggtgaaataaccgaccttttgcaactggcccgcatacccactctcatggcatttgagcgggtgcctgaacccgtgcctgcctcagacacatatgtgccctacgttgccgttcccacccagttcgatgacaggcctctcatctccttcccgatcaccctttcagatcccgtctatcagaacaccctggttggcgccatcagttcaaatttcgccaattaccgtgggtgtatccaaatcactctgacattttgtggacccatgatggcgagagggaaattcctgctctcgtattctcccccaaatggaacgcaaccacagactctttccgaagctatgcagtgcacatactctatttgggacataggcttgaactctagttggaccttcgtcgtcccctacatctcgcccagtgactaccgtgaaactcgagccattaccaactcggtttactccgctgatggttggtttagcctgcacaagttgaccaaaattactctaccacctgactgtccgcaaagtccctgcattctctttttcgcttctgctggtgaggattacactctccgtctccccgttgattgtaatccttcctatgtgttccactccaccgacaacgccgagaccggggttattgaggcgggtaacactgacaccgatttctctggtgaactggcggctcctggctctaaccacactaatgtcaagttcctgtttgatcgatctcgattattgaatgtaatcaaggtactggagaaggacgccgttttcccccgccctttccctacacaagaaggtgcgcagcaggatgatggttacttttgtcttctgaccccccgcccaacagtcgcttcccgacccgccactcgtttcggcctgtacgccaatccgtccggcagtggtgttcttgctaacacttcactggacttcaatttttatagcttggcctgtttcacttactttagatcggaccttgaggttacggtggtctcactagagccggatctggaatttgctgtagggtggtttccttctggcagtgaataccaggcttccagctttgtctacgaccagctgcatgtgcccttccactttactgggcgcactccccgcgctttcgctagcaagggtgggaaggtatctttcgtgctcccttggaactctgtctcgtctgtgctccccgtgcgctgggggggggcttccaagctctcttctgctacgcggggtctaccggcgcatgctgattgggggactatttacgcctttgtcccccgtcctaatgagaagaaaagcaccgctgtaaaacacgtggccgtgtacattcggtacaagaacgcacgtgcctggtgccccagcatgcttccctttcgcagctacaagcagaagatgctgatgcaatctggcgatatcgagaccaatcctggtcctgcttctgacaacccaattttggagtttcttgaagcagaaaatgatctagtcactctggcctctctctggaagatggtgcactctgttcaacagacctggagaaagtatgtgaagaacgatgatttttggcccaatttactcagcgagctagtgggggaaggctctgtcgccttggccgccacgctatccaaccaagcttcagtaaaggctcttttgggcctgcactttctctctcgggggctcaattacactgacttttactctttactgatagagaaatgctctagtttctttaccgtagaaccacctcctccaccagctgaaaacctgatgaccaagccctcagtgaagtcgaaattccgaaaactgtttaagatgcaaggacccatggacaaagtcaaagactggaaccaaatagctgccggcttgaagaattttcaatttgttcgtgacctagtcaaagaggtggtcgattggctgcaggcctggatcaacaaagagaaagccagccctgtcctccagtaccagttggagatgaagaagctcgggcctgtggccttggctcatgacgctttcatggctggttccgggccccctcttagcgacgaccagattgaatacctccagaacctcaaatctcttgccctaacactggggaagactaatttggcccaaagtctcaccactatgatcaatgccaaacaaagttcagcccaacgagttgaacccgttgtggtggtccttagaggcaagccgggatgcggcaagagcttggcctctacgttgattgcccaggctgtgtccaagcgcctctatggctcccaaagtgtatattctcttcccccagatccagatttcttcgatggatacaaaggacagttcgtgaccttgatggatgatttgggacaaaacccggatggacaagatttctccaccttttgtcagatggtgtcgaccgcccaatttctccccaacatggcggaccttgcagagaaagggcgtccctttacctccaatctcatcattgcaactacaaatctcccccacttcagtcctgtcaccattgctgatccttctgcagtctctcgccgtatcaactacgatctgactctagaagtatctgaggcctacaagaaacacacacggctgaattttgacttggctttcaggcgcacagacgccccccccatttatccttttgctgcccatgtgccctttgtggacgtagctgtgcgcttcaaaaatggtcaccagaattttaatctcctagagttggtcgattccatttgtacagacattcgagccaagcaacaaggtgcccgaaacatgcagactctggttctacagagccccaacgagaatgatgacacccccgtcgacgaggcgttgggtagagttctctcccccgctgcggtcgatgaggcgcttgtcgacctcactccagaggccgacccggttggccgtttggctattcttgccaagctaggtcttgccctagctgcggtcacccctggtctgataatcttggcagtgggactctacaggtacttctctggctctgatgcagaccaagaagaaacagaaagtgagggatctgtcaaggcacccaggagcgaaaatgcttatgacggcccgaagaaaaactctaagccccctggagcactctctctcatggaaatgcaacagcccaacgtggacatgggctttgaggctgcggtcgctaagaaagtggtcgtccccattaccttcatggttcccaacagaccttctgggcttacacagtccgctcttctggtgaccggccggaccttcctaatcaatgaacatacatggtccaatccctcctggaccagcttcacaatccgcggtgaggtacacactcgtgatgagcccttccaaacggttcatttcactcaccacggtattcccacagatctgatgatggtacgtctcggaccgggcaattctttccctaacaatctagacaagtttggacttgaccagatgccggcacgcaactcccgtgtggttggcgtttcgtccagttacggaaacttcttcttctctggaaatttcctcggatttgttgattccatcacctctgaacaaggaacttacgcaagactctttaggtacagggtgacgacctacaaaggatggtgcggctcggccctggtctgtgaggccggtggcgtccgacgcatcattggcctgcattctgctggcgccgccggtatcggcgccgggacctatatctcaaaattaggactaatcaaagccctgaaacacctcggtgaacctttggccacaatgcaaggactgatgactgaattagagcctggaatcaccgtacatgtaccccggaaatccaaattgagaaagacgaccgcacacgcggtgtacaaaccggagtttgagcctgctgtgttgtcaaaatttgatcccagactgaacaaggatgttgacttggatgaagtaatttggtctaaacacactgccaatgtcccttaccaacctcctttgttctacacatacatgtcagagtacgctcatcgagtcttctccttcttggggaaagacaatgacattctgaccgtcaaagaagcaattctgggcatccccggactagaccccatggatccccacacagctccgggtctgccttacgccatcaacggccttcgacgtactgatctcgtcgattttgtgaacggtacagtagatgcggcgctggctgtacaaatccagaaattcttagacggtgactactctgaccatgtcttccaaacttttctgaaagatgagatcagaccctcagagaaagtccgagcgggaaaaacccgcattgttgatgtgccctccctggcgcattgcattgtgggcagaatgttgcttgggcgctttgctgccaagtttcaatcccatcctggctttctcctcggctctgctatcgggtctgaccctgatgttttctggaccgtcataggggctcaactcgaggggagaaagaacacgtatgacgtggactacagtgcctttgactcttcacacggcactggctccttcgaggctctcatctctcactttttcaccgtggacaatggttttagccctgcgctgggaccgtatctcagatccctggctgtctcggtgcacgcttacggcgagcgtcgcatcaagattaccggtggcctcccctccggttgtgccgcgaccagcctgctgaacacagtgctcaacaatgtgatcatcaggactgctctggcattgacttacaaggaatttgaatatgacatggttgatatcatcgcctacggtgacgaccttctggttggcacggattacgatctggacttcaatgaggtggcacgacgcgctgccaagttggggtataagatgactcctgccaacaagggttctgtcttccctccgacttcctctctttccgatgctgtttttctaaagcgcaaattcgtccaaaacaacgacggcttatacaaaccagttatggatttaaagaatttggaagccatgctctcctacttcaaaccaggaacactactcgagaagctgcaatctgtttctatgttggctcaacattctggaaaagaagaatatgatagattgatgcaccccttcgctgactacggtgccgtaccgagtcacgagtacctgcaggcaagatggagggccttgttcgactgacccagatagcccaaggcgcttcggtgctgccggcgattctgggagaactcagtcggaacagaaaagggaaaaaaaaaaaaaaaaaaaaaaaaaaaaaa

SEQ ID NO: 13 - DNA, 8093 bp, Cardiovirus Cardiovirus B
ttgaaagggggcccgggggatctcccccgcggcaactggttacagttgtcgcggacggagatcatcccccggtcaccccctttcgacgcgggtactgcgatagtgccaccccagtctctcctactcccgactcccgaccctaacccaggttcctcggaataggaacaccactttactcatcccctggatgctgactaatcagaggaacgtcagcattttccggcccaggctaagagaagtagataagttagaatccaaattgatttatcatccccttgacgaattcgcgttggaaaagcacctctcacttgccgctcttcacacccattaattcatttcggcctctgtgttgagccccttgttgaagtgtttccctccatcgcgacgtggttggagatctaagtcaaccgactccgacgaaactaccatcatgtctccccgattatgtgatgctttctgccctgctgggtggagcatcctcgggttgagaaatccttcttcctttcaccttggaccccggtcccccggtctaagccgcttggaataagacagggttattttcacctctttttcttctactccacagtgctctatactgtggaagggtatgtgttgccccttccttcttggagaacgtgcgcggcggtctttccgtctctcgacaagcgcgcgtgcaacatgcagagtaacgcgaagaaagcagttcttggactagctttagtatctgcaagaagacagctgtagcgaccacacaaaggcagcggaacccccctcctggtaacaggagcctctgcggccaaaagccacgtggataagatccacctttgtgtgcggtgcaaccccagcaccctggtttcttgaagatactctagtgaacccttgaatggcaatctcaagcgcctctgtagggaagccaagaatgtccaggaggtaccccttcctcgcggaagggatctgacctggagacacgtcgcaagtgctttacacctgtgctcgtgtttaaaaattgtcacagctttcccaaaccaagtggtcttggttttcctttttattactattgacactatggcttgcaaacatggatacccagatgtgtgccctatttgcacagccgttgacgttactcccggatttgaatatttgctcctggcagacggtgaatggttcccaacggaccttctttgtgtggacctggacgatgacgtcttctggccttcgaactcgagcaatcaatctgaaacaatggaatggactgacttaccgctcgtacgcgatattgtcatggaaccccagggaaacgcctcttcatctgacaagagtaactcccagtcctcaggtaacgaaggggtcattatcaacaacttctattccaatcaataccaaaattcaattgatttgtctgccagcggtggcaatgctggcgacgccccccaaaacaacggacaattgtcgaacatcttgggcggcgctgcaaatgcttttgctactatggcacctctcctcttggatcaaaacacagaggagatggagaatctctctgacagagtagcttctgacaaagctggaaattcggccacaaacacccaatctactgttggtcgactctgtggttacggagaagcccaccacggagaacacccagcttcctgtgcggatactgcaacggataaagttcttgcggctgagcgctattacaccatagacttggccagttggaccactacccaggaagctttctcccacatccgcattcctctcccccacgtcctcgctggcgaggacggaggtgtcttcggtgccacccttcgaagacactatctttgcaagaccggctggcgagtacaagttcagtgcaatgcatctcaatttcacgccggctctcttcttgttttcatggctcctgaattctacacaggcaaaggaacaaagactggtgacatggagcccactgaccctttcaccatggacaccacttggcgtgccccgcaaggtgcgcccactggttaccgctacgatagccggaccggtttcttcgccatgaaccaccagaaccaatggcagtggactgtttatcctcaccagattctcaatttgcgcacaaacaccactgtcgatttggaagtgccctatgtcaacattgctcctactagttcttggacccagcatgctaattggaccctcgtcgttgccgtcttcagccccctgcagtatgcttctggttcttcctctgatgtccaaattacggcctccatccagcccgtaaaccccgtgttcaatggtcttagacatgagactgtgatagctcagagccctatagcagtcacagtgcgtgagcacaaaggctgcttctactctaccaacccagacacgactgtccccatttatggaaaaaccatttcaactcccaatgattacatgtgtggcgagttctcagatcttcttgagctctgtaagttacctacctttttgggaaacccaaattcaaataacaagcgctatccttatttctctgcaacaaattctgtcccgacgacctcattggtcgactaccaagttgctctttcttgctcttgcatgtgtaattccatgctcgctgctgttgcccgcaacttcaaccagtaccgtggctctttaaatttcctctttgtcttcaccggtgctgcgatggttaaaggcaagttcttgatagcctacactccccctggcgcaggaaagcccacgactcgtgaccaagccatgcaagccacctatgccatctgggacttgggtttgaattcgagctttgttttcactgctccttttatttcccctactcactatcgccagactagctataccagtgccaccatcgcctcggttgatggatgggtgactgtctggcaattgacacctcttacctacccttccggtgctcctgtcaactctgacatcctcactctcgtctccgcgggagatgatttcactctcagaatgcccatttcgcccaccaagtgggcgccccagggaagcgacaacgccgaaaaaggaaaagtttccaacgacgatgcttccgtcgactttgtggcagaacccgtgaaactaccggagaaccaaacccgtgtggcctttttctatgacagagctgtgcccattggaatgttgcgtcctggtcagaacatagaatccacctttgtctaccaggaaaacgatctgcggctcaactgccttctcttgactccacttccctctttttgtccagatagcacttctggaccggtcaaaacaaaggctccagttcagtggagatgggtccgctccggcggtaccaccaattttccactcatgactaaacaggactatgctttcctctgcttttctccttttacctattacaagtgtgaccttgaggttacagtcagcgctctgggcactgacacggttgcctccgtcctccgctgggccccgaccggcgcccctgcggatgttactgatcagttaataggttacacacccagccttggcgagacgcgcaacccgcatatgtggctcgtcggtgctggcaacacacaaatctcttttgtggttccttataactctcctctttccgtcctccctgccgcttggtttaacggatggtctgactttggaaacaccaaggactttggggttgcccccaacgctgattttggtcgactttggattcaaggcaacacctccgcttctgtccggatcaggtacaagaaaatgaaggtcttttgtccccgcccgactctcttctttccctggcctgtgtccactaggagcaagatcaatgccgacaacccggtccccattctcgaacttgaaaatcctgccgctttctaccgcattgatcttttcatcacctttattgatgagttcatcacctttgactacaaggttcacggacgtcctgtgctcaccttccggatcccaggcttcggtctgaccccggcaggcagaatgctcgtgtgcatgggcgaaaaacccgcacacggtccgttcacctcttccagatccctctatcatgtcatcttcactgccacctgcagttccttcagcttttccatttacaaggggcgctatcgctcctggaagaagcccatccatgacgaacttgtggatcgtggttacaccactttcggcgagttcttcagggctgtgcgcgcataccatgctgactattacaaacagagactcatacacgatgtggaaatgaatccaggccctgtgcagtcggtttttcagccacaaggtgcggtgctaactaaatccctagcaccccaggcaggaatccaaaatctccttctacgcctccttggtatagacggtgactgttcagaagttagtaaggcaatcacggtcgtcactgacttgtttgctgcatgggaaagggcaaaaaccactttggtctctcctgaattttggtcaaaactcatattaaaaaccaccaaattcattgctgcctccgtgctttacctacacaaccctgatttcactactactgtttgtctctcattgatgactggtgtggatctcctcaccaatgactctgtttttgattggcttaaaaacaaactgtcttctttctttcgtactcctcccccagtttgccctaatgttttgcaacctcaggggcctctacgtgaggccaatgaaggtttcacctttgctaagaacattgaatgggctatgaaaaccatccagtctatcgtcaattggcttactagttggtttaaacaagaagaggaccacccccaatcaaaattagacaaatttctcatggaattccccgaccattgtaggaatatcatggacatgagaaatggtcgtaaggcctattgtgaatgcactgcttccttcaagtattttgatgagctttacaatcttgctgtcacctgcaaaagaattccattggcctccctttgtgagaaatttaagaatagacatgatcactctgtcaccagacctgagccggttgttgtcgttcttcgcggcgccgctggacaaggtaagtctgtgaccagccaaattattgcccaatccgtgtctaagatggcctttggtcgtcaatctgtctattctatgccccctgattcggaatattttgatggctacgaaaaccaattctctgtgattatggatgatctaggacaaaatcctgatggtgaagacttcactgtcttttgccagatggtttctagtacaaattttctcccgaatatggctcacctggaaagaaaaggcaccccttttacctctagcttcattgttgctacaacaaatttgcccaaattccgccctgttacggttgcccattaccctgctgttgataggcgaatcacttttgattttaccgttactgctggaccccattgcacgacgtccaatggaatgttggacattgagaaagcttttgatgagatacccggctccaaacctcagcttgcttgttttagtgctgattgccccctcttacacaaaagaggagtcatgttcacttgcaaccgcactaaggccgtttacaaccttcaacaagttgtaaaaatggtcaatgacaccatcacccgcaagactgaaaatgtgaagaaaatgaatagcctggttgcccagtccccaccagactgggagcactttgaaaatatcctcacttgcctccgtcagaacaatgctgctcttcaggatcaacttgatgaattacaggaagcgttcgcccaagctcgcgagcgttccgactttctttctgattggctgaaggtttctgctattatttttgctggtattgcctcactttctgctgttataaaattagcctccaaatttaaagaatcaatttggccttcgcccgtgagagttgagctctctgagggtgaacaagccgcatatgctggtcgtgcgcgtgctcaaaaacaagcccttcaggtcctggatattcaaggaggcgggaaggttctagcccaagccggtaaccccgtcatggactttgagcttttctgtgccaagaatatggttgcccctatcaccttctactaccctgacaaggctgaagtgacccagagctgcttgctgctccgtgcccacctcttcgtggtcaatcgccacgttgctgaaacggaatggacagctttcaagcttaaagatgtgaggcatgagcgcgacactgttgtcacgcgctccgtcaaccgttcaggcgctgaaacggacctcacattcataaaggttactaaaggaccactctttaaggacaatgttaacaagttttgctcaaataaggatgattttcccgctaggaatgatgctgtcaccgggattatgaacactggattggcctttgtgtactccggtaatttcctaattggcaatcaacctgtgaacacaacaactggagcctgcttcaaccactgcctccactaccgggctcaaacccgacgtggttggtgtggttctgctgtcatctgtaacgttaacggcaagaaagctgtttacgggatgcactctgctggaggcggaggccttgccgccgctaccatcatcaccagagagttgattgaggcagctgagaagtctatgttggcgttggaaccgcaaggtgccatcgtagacatttccacaggatctgttgtgcatgtccccagaaagaccaaattgaggagaacagtcgctcatgatgttttccaacccaaattcgaacctgcagtgctgtcacgttatgaccctcggactgataaggacgttgatgttgtagctttttccaaacacaccactaacatggaaagcttgcccccggtctttgatatcgtctgtgatgaatacgctaaccgcgtcttcactatccttggtaaagacaacggtcttctgaccgttgaacaggccgtgcttggcttgccaggtatggaccccatggagaaggacacctctcctggattgccctacactcaacaaggacttagacgaaccgaccttctgaatttcaacactgctaaaatgacacctcaattggactacgcccattccaaattggtgctcggcgtctatgacgacgtcgtctaccaatcatttttgaaagatgaaattcgacccttggagaagatccacgaagcaaaaacccggattgttgacgtacccccgtttgctcactgcatttggggaagacagcttctgggacgttttgcctccaaattccagaccaaacccggactcgaactcggatctgcaattggaactgacccggacgttgattggacaccgtacgccgctgagctgagtgggttcaattacgtctatgatgtagattactccaactttgatgcttcccattctactgcaatgtttgaatgcttgatcaagaatttcttcacagagcaaaatggatttgacagacgcattgccgagtatctcagatccttggctgtgtcgcgacatgcttacgaggaccgccgtgtccttatacgtggaggcttgctttcgggctgcgctgccaccagcatgttaaacaccatcatgaacaatgttataattcgtgctgccctgtaccttacctactcaaattttgaatttgatgatattaaggtcctttcctatggagatgaccttttaattggaactaattaccaaattgattttaatcttgttaaagaaagattagcccccttcggttataagattactcctgccaacaagaccaccacctttcccctgacctcccatttgcaagatgttacctttctaaagaggagatttgtgagattcaattcctacctgtttagacctcaaatggatgctgtcaacttgaaagcaatggttagctactgtaaaccaggaacacttaaagagaaactaatgtccattgctcttctggccgttcactccggaccagatatatatgatgagattttcctgccctttaggaatgttggaatagttgtccctacctatagttctatgctttatagatggcttagcttatttagatgaacatcctctcgatcggatcgcaacgctttaccctagaagccactagggtgtacgcggccgttctgacgttggaattcttttaggcaaaagttgtgtagatgcttataattggaaatgagaat

SEQ ID NO: 14 - DNA, 7761 bp, Cardiovirus Cardiovirus A
tttgaaagccgggggtgggagatccggattgccggtccgctcgatatcgcgggccgggtccgtgactacccactccccctttcaacgtgaaggctacgatagtgccagggcgggtcctgccgaaagtgccaacccaaaaccacataacccccccccccccccccccccccccccccccccccccccccccccccccctcccccccccctcacattactggccgaagccgcttggaataaggccggtgtgcgtctgtctatatgttacttctactacattgtcgtctgtgacgatgtaggggcccggaacctggtcctgtcttcttgacgagtattcctaggggtctttcccctctcgacaaaggaatacaaggtctgttgaatgtcgtgaaggaagcagttcctctggacgcttcttgaagacaagcaacgtctgtagcgaccctttgcaggcagcggaatcccccacctggtgacaggtgcctctgcggccgaaagccacgtgtgtaagacacacctgcaaaggcggcacaaccccagtgccacgttgtgcgttggatagttgtggaaagagtcaaatggctctcctcaagcgtattcaacaaggggctgaaggatgcccagaaggtaccccactggctgggatctgatctggggcctcggtgcgcgtgctttacacgcgttgagtcgaggttaaaaaacgtctaggccccccgaaccacggggacgtggttttcctttgaaaaccacgacaataatatggctacaaccatggaacaagagatttgtgctcattccatgacctttgaagaatgcccaaaatgctccgccttacaatacagaaatggtttctacctactgaagtatgatgaagagtggtaccctgaggagtcgttgactgatggtgaagatgatgtgttcgatcctgatttggacatggaagttgtgttcgagacacaaggcaattcaacctcatccgataaaaacaattcttcttctgagggtaatgaaggagtgattataaataatttctattccaaccaataccaaaattcaattgatttatctgccaatgctactggctctgaccccccaaaaacctatggccaattttcgaatctgttgtcaggagcagtcaatgctttttctaacatgctccccctccttgcagatcagaatacagaggagatggagaatttatcagaccgagtgtctcaagacactgccggcaacacggtcacaaacacccaatcaaccgttggtcgtcttgtcggatacggaacagttcatgatggggaacatccagcttcttgtgctgatactgcctcagagaaaattctggcagttgaaagatattacactttcaaagtgaatgattggacttccacccagaaaccttttgaatatattcgtataccactaccacatgttctatcaggtgaggatggtggtgtctttggagctactctccgaagacactaccttgtaaagactggctggagagttcaggtccagtgtaatgcatcccagtttcatgcggggagtctcctggtctttatggccccggagtatcctacactggacgtgtttgcaatggacaacagatggtccaaggataatctgcctaatggaacaagaacgcaaaccaacaggaagggtcctttcgctatggaccaccaaaatttttggcaatggactctctatccgcaccagtttttaaatcttagaactaatacgacggtagatttggaggtaccttatgtaaacattgcccctacctcctcctggacacaacatgcttcctggactttggtgattgccgtggtagcccccttgacctattcgactggtgcttcaacaagccttgacatcaccgcctcaattcaacctgttcgtcccgtgtttaacggactacggcatgaggtactgtctagacagtctcctatccctgtgaccatccgggagcatgctgggacctggtattccactcttcctgatagcactgttcccatctatggaaaaactcctgttgcccccgcgaattatatggtaggagaatacaaagacttcttggagattgcccaaattccgaccttcattgggaacaaagtgcccaatgctgtcccatacattgaggcttccaacacagctgtcaagacacaaccacttgccgtttatcaggtaactctttcatgttcttgcttggctaacacattcctagccgctctctcccggaattttgcccagtaccgcggatcactagtgtacacttttgtgttcactgggactgcgatgatgaagggtaagtttcttattgcatacacccctcccggcgccgggaaaccgacaagcagagatcaggccatgcaagccacttacgctatttgggatctaggtctgaattcttcgtactcgtttactgtgcctttcatttctccaacccacttccgcatggtgggaactgatcaagctaacattactaatgtggatggttgggtcactgtatggcagttgacccctcttacttaccctccaggttgccccacctcggcaaaaatcctcacaatggttagcgctgggaaggacttctctctaaaaatgcccatttctcctgccccttggagccctcaaggcgtagaaaatgcagagaagggtgtaactgaaaatacagatgcaacagctgattttgtggcacagcctgtttatttgcctgagaaccagactaaggtagcctttttctatgataggtctagtcccattggagctttcgctgtgaaatctgggagcttagagtcgggatttgcccctttctccaacaaggcgtgtcccaattccgtcattttaacaccagggccgcagtttgatccggcttatgatcaactgcgtccacagcgtttgaccgaaatttggggcaatgggaatgaggaaacctccgaagtcttccctctaaaaactaagcaggattattcgttttgtctcttttccccctttgtgtattataaatgtgacctggaagtgaccctaagtccacacacctccggtgctcacgggctgttggtccgctggtgccctaccggaactcccaccaagcccaccacccaggtgctgcatgaggtaagttctctctcagaagggcgaaccccacaggtgtacagtgccggacctggtacttccaatcagatttcatttgtagttccttataattcgcctttatctgttctgcctgctgtttggtataatgggcataagagatttgacaacacaggcgacttgggaatagctcccaattctgatttcggcaccctcttctttgctggaacgaaacctgatattaaattcactgtatatttgagatacaaaaacatgagggtcttctgcccacgtccaactgttttctttccttggcctacttctggtgacaaaatagatatgactcctagagcaggagttcttatgcttgaaagccccaaccctttggatgtctctaaaacttacccaactctgcacatcctgctacaattcaaccacagaggattggaagccaggattttcagacatggccagctttgggccgaaacacatgcagaagtggtgcttaggtcaaagacaaaacaaatcagcttcctgagcaatggtagctacccctctatggatgccacaacaccgttaaacccctggaagagcacatatcaggcagttttgcgtgctgaaccccatcgggtgaccatggacgtgtaccacaagagaataaggccatttagattgcccctagtccagaaagagtggaggacttgtgaagagaatgtttttggtctgtatcatgtcttcgaaacacattatgcaggatacttttcagatcttttgatccacgatgtcgagaccaatcccgggcctttcacgtttaaaccaagacaacggccggtttttcagactcaaggagcggcagtgtcatcaatggctcaaaccctactgccgaacgacttggccagcaaagctatgggatcagcctttacggctttgctcgatgccaacgaggacgcccaaaaagcaatgaagattataaagacgttaagttctctatcggatgcatgggaaaatgtaaaaggaacattgaacaacccggagttctggaaacaactcttaagcagatgtgtgcaactgattgccgggatgacgatagcagtgatgcatccggaccccttgacgctgctttgcttgggagtcttgacagcagcagagatcacaagccagacaagcctgtgcgaagaaatagcagctaaattcaaaacaatcttcactactcccccccctcgttttcctgtgatctcacttttccaacagcagtccccccttaaacaggtcaatgatgttttctctctggcaaagaacctagactgggcagtgaagacagttgaaaaagtggttgattggtttggaacttgggttgcacaagaagagagagagcagaccctggatcagctgctccagcgattccccgagcacgcgaagaggatttcagaccttcgtaatggaatggctgcctatgttgaatgcaaggagagcttcgatttctttgagaaactttacaatcaagcagttaaggagaagagaactggaattgctgccgtttgtgaaaagttcagacaaaaacatgaccatgccacggcacgatgtgaaccagttgtgatcgtgttgcgcggtgatgctggtcagggaaagtcattgtcaagtcaaatcattgcccaggctgtttctaaaactatttttgggcgccagtcagtctattctcttcctcctgattcagatttctttgatggctatgagaaccagtttgccgcaataatggatgatttgggacaaaatcccgatggttcagattttaccaccttctgccagatggtgtccacgacaaacttactcccaaacatggctagtctggagagaaaaggaacccccttcacatctcagctcgtagtggctacgacaaatctcccggagtttagacctgttacaattgcccattatcctgctgttgagcgccgcattactttcgactactcggtgtctgcaggtccagtttgttcaaagaccgaagctggttgcaaagtgttggatgttgaaagagcctttaggccaacaggtgatgcccctcttccatgtttccaaaataattgcctattcttggaaaaggctggcctgcagttcagagataataggtccaaggagattttatctttggttgatgtgatcgagagagctgtgactagaatagagaggaagaagaaagtcctcacagcggtgcagacccttgtggcccaagggcctgttgatgaagttagcttttactcggttgtccagcagctcaaggctagacaggaagctacagatgagcagttggaggaactccaggaagcctttgcccgggttcaggagcggagttcagtgttctcagactggatgaagatttccgccatgctttgtgccgccaccctagctctcacacaagtggtgaagatggctaaggctgtcaaacagatggtgagaccagacttggtgcgggtccagctggatgagcaagaacagggtccttataacgaaaccacccgtataaagcccaaaactcttcaattgctagatgtccagggtccaaatccgactatggactttgaaaagtttgttgctaagtttgttacagcccccattggttttgtgtaccccacaggtgttagcactcagacatgcctacttgtgaagggacgtaccctggcggtgaatcggcacatggcagagtctgactggacctccattgtagtgcgtggtgttagccacacccgctcctcagtgaaaattatcgccatagccaaagctgggaaggagactgatgtgtcgttcattcgcctttcatctggtcccttgtttagagataatactagcaagtttgtgaaggccagtgacgtattgccccatagctcttccccccttattgggatcatgaatgtggacattccaatgatgtatacagggacatttctgaaggctggcgtctcggtgccggttgagacagggcagactttcaaccactgcatccactacaaagcaaatacacggaaaggctggtgtgggtctgcaatcctggccgatcttggtgggagcaagaagattctgggcttccattcagccggctccatgggcgttgcagccgcgtcgataatttcacaagaaatgatcgatgcggtggtgcaggccttcgagccccagggtgcacttgagcggctgccagatggtccgcgcatccatgtaccccgaaagactgctttgcgcccgactgttgccagacaggtcttccaacccgcttttgccccagctgttctttctaaatttgacccacgcacggatgctgatgttgacgaagtagctttttcaaaacatacatccaatcaggaaaccctccccccagtgtttagaatggttgctagggaatatgcgaacagagtattcgcactgttgggcagagacaatggaaggctgtcagtcaagcaagccttggatggacttgaggggatggaccctatggacaagaacacttccccaggccttccatatactacgctaggaatgcgtagaacagatgttgtagattgggaaaccgccactcttatcccctttgcagcagagagactagaaaaaatgaataacaaagacttttccgacattgtctatcagacattcctcaaggacgagcttagacctatagagaaggtacaagccgccaagacacggattgtggatgttccaccatttgagcactgcattctgggtagacaactgctcgggaagttcgcttccaaattccagacccaaccgggtctggaattgggctctgcaattgggtgtgacccagacgtgcattggacagcctttggtgtggcaatgcaaggctttgaaagggtgtatgatgtggattattccaattttgattctacccattcagtagctatatttaggttattggcagaggaattcttttctgaagagaatggcttcgacccattggttaaggattatcttgagtccttagccatttcaaaacatgcgtatgaggaaaagcgctatctcataaccggtggtcttccgtctggttgtgcagcgacctcaatgttaaatacaataatgaataatattattattagggccggtttgtatcttacatataaaaattttgagtttgatgacgtgaaggtcttgtcttatggtgatgatcttctagtggcaactaattaccaattgaactttgatagagtgagaacaagcctggcaaagacaggatataagattacacccgctaacaaaacttctacctttcccctggaatcaactcttgaggatgtagtattcctgaagagaaaatttaagaaagagggccctctatatcgacctgtcatgaatagagaggcgttagaagcaatgttgtcatattatcgtccagggactctatctgagaaactcacttcaatcactatgcttgccgtgcattctggcaaacaggagtacgatcgactctttgccccgtttcgcgaggttggagtgatcgtaccaacttttgagagtgtggagtacagatggaggagcctgttctggtaatagcgcggtcactggcacaacgcgttacccggtaagccaaccgggtgtacacggtcgtcataccgcagacagggttcttctactttgcaagataaactagagtagtaaaataaatagtttt

SEQ ID NO: 15 - DNA, 7861 bp, Cardiovirus Cardiovirus A
ttgaaagccgggggtgggagatccggattgccagtctgctcgatatcgcaggctgggtccgtgactacccactccccctttcaacgtgaaggctacgatagtgccagggcgggtactgccgtaagtgccaccccaaaacaacaacagaccccccccccccccccccccccccccccccccccccccccccccccccccccccccccccccccccccccccccccccccccccccccccccccccccccccccccccccccccccccccccccccccccccccccccccctctccctcccccccccctaacgttactggccgaagccgcttggaataaggccggtgtgcgtttgtctatatgttattttccaccatattgccgtcttttggcaatgtgagggcccggaaacctggccctgtcttcttgacgagcattcctaggggtctttcccctctcgccaaaggaatgcaaggtctgttgaatgtcgtgaaggaagcagttcctctggaagcttcttgaagacaaacaacgtctgtagcgaccctttgcaggcagcggaaccccccacctggcgacaggtgcctctgcggccaaaagccacgtgtataagatacacctgcaaaggcggcacaaccccagtgccacgttgtgagttggatagttgtggaaagagtcaaatggctctcctcaagcgtattcaacaaggggctgaaggatgcccagaaggtaccccattgtatgggatctgatctggggcctcggtgcacatgctttacgtgtgtttagtcgaggttaaaaaacgtctaggccccccgaaccacggggacgtggttttcctttgaaaaacacgatgataatatggccacaaccatggaacaagagacttgcgcgcactctctcacttttgaggaatgcccaaaatgctctgctctacaataccgcaatggattttacctgctaaagtatgatgaagaatggtacccagaggagttattgactgatggagaggatgatgtctttgatcccgaattagacatggaagtcgttttcgagttacagggcaattccacctcctcagacaagaataactcctcctcggaaggcaatgaaggtgtgatcatcaataacttttactccaaccaatatcaaaactccattgacctctctgctaatgcagccgggtctgacccacccagaacctacggtcaattttcgaatctcttttcgggcgcagtgaatgccttttctaatatgcttccattgctagctgatcaaaatacagaagaaatggagaatctgtctgatcgagtgtctcaagacactgccggcaatacggtcacaaacacccagtcaacagtgggccgtcttgtcggttatggtaccgttcatgatggagagcatccggcatcatgtgctgacactgcttcagaaaagatcctggcggtggaaaggtactacaccttcaaggtaaatgattggacatcaacacaaaagccctttgagtacatccgcattccccttcctcacgtcctgtccggtgaagatggtggtgtctttggtgcggccctccgccggcactacctggtgaaaactggatggcgggtgcaagttcagtgcaacgcctctcaattccacgctggaagtttgctggtgttcatggcaccagagtatccaaccttagatacttttgtcatggacaaccgttggtcaaaggataacctgcctaatggagccagaactcagacaaacaaaaagggaccatttgccatggaccatcagaacttctggcagtggaccttgtatccccatcaattcctgaatctgagaactaacaccacagtggatcttgaggtgccatatgtaaacatagcccccacttcctcctggacacaacatgcttcctggactttggtgattgcagtggttgctcccctgacatactcaaccggggcttctaccagtttggatatcaccgcttctattcagccagtaaggcctgtctttaatggcctccggcacgagacactttctagacagtcgcccattccggtcacaattagagaacatgctggtacctggtattctactctgccagacagcacagtgcctatttatggcaagactcctgttgctccatccaattacatggtgggcgaatacaaggacttcctggagatagctcagattccaacctttattgggaataagatccctaatgctgtcccctacattgaggcatccaacacagccgtcaagacccaaccgctggccacctatcaagtgaccttgtcctgctcctgtctggccaatacattcttggccgctttgtctagaaactttgctcagtaccggggatcattggtttatacctttgtgttcactgggaccgcgatgatgaagggcaagttcctcattgcctacaccccacctggagcgggcaagcccactagtcgagaccaagccatgcaggcgacttatgcgatttgggatttggggctaaattcttcttactccttcactgtgccttttatttctcccactcacttccgcatggtaggtactgaccaagtcaacatcactaatgcggatggctgggttaccgtgtggcagctcactcccctcacttacccaccaggatgcccgacctctgctaagatactaacaatggtgagcgcagggaaggatttctcactcaagatgcctatctcacctgccccctggagccctcagggagtagaaaacgctgaaaaaggggtcactgaaaacgcagacgcaactgctgactttgtggctcaaccagtttacttgcctgagaaccaaacgaaggtggctttcttctatgataggtccagtcccattggtgccttcaccgtgcagtccggcagtctagaatctggttttgccccgttctctaataagacttgcccgaactcagtgatactgacccctgggccccaatttgaccccgcctatgaccaactcaggccacagcgtctgacagaaatttggggcaatggaaatgaggagacctcaaaagtctttccgcttaaatccaaacaggattattccttctgcctcttctccccctttgtgtattataaatgtgatttagaagtgactcttagtcctcacacttcaggcaaccatgggctgttggtgaggtggtgtcccactggtacaccaaccaagcccactacccaggttctccatgaagtaagttccctctcagaaggcagaaccccccaggtttatagtgccggacctggcatttcaaatcagatttcctttgtagttccttacaattctccactttcagtcctaccagctgtctggtataatggacacaagagatttgacaacactgggagcttgggcattgcccctaattctgatttcggcactctgttctttgctggcacaaagcctgacattaaattcacagtctacttgagatacaagaatatgagagttttttgcccacgtccgactgtctttttcccctggcccacttccggggacaagattgatatgaccccgagagctggagtcttgatgctagagagtccaaatgccctagacatttcaagaacataccccacgttacatgttctcattcaattcaaccatagaggtttggaggttagattgtttagacatggacaattttgggctgaaacacgtgcggacgtgattctgagatcgaagaccaaacaggtctctttcctgagcaacgggaactacccgtcaatggactctagagctccctggaatccttggaagaatacctaccaggcggttctaagagcagaaccatgtagagtgaccatggatatatattataagagagtcaggccttttagactgcccctggttcagaaggaatggcgcgtgcgagaggagaacgttttcggtttgtaccggatcttcaatgcccactacgctggttactttgcggacctactgatccatgacattgagacaaatccagggcccttcatgtttagaccaaggaaacaggttttccagacccaaggagcggcagtgtcatcaatggctcaaaccctactgccgaacgaccttgccagcaaagctatgggatcagcttttacggctttgctcgatgccaacgaggacgcccgaaaagcaatgaagattataaagacattaagttctctatcggatgcatgggaaaatgtaaaagaaacactaaacaacccagagttctggaagcagctcttgagcagatgtgtgcagctgattgcagggatgacaatagcagtgatgcatccggaccctttgactctgctctgcttaggaacattgacggccgccgagattacaagccagacaagtctgtgcgaagaaatagcagctaagttcaagacaattttcatcactcctccaccacggtttcccacaatctctcttttccaacaacaatcccccttgaaacaggtaaatgattttttctccctagccaagaacctggactgggccgtcaagactgtggaaaaggtggttgattggtttgggacatggatagtacaggaggaaaaggaacagaccctagatcagctcttgcagcgtttccccgaacatgcgaagcgcatttctgatctccggaatggaatggccgcctatgtagagtgcaaggagagttttgatttctttgaaaagctgtacaatcaggcagtgaaagagaagagaacgggtatcgccgccgtctgtgaaaaattcagacagaagcatgaccacgccaccgctcggtgtgagccagtcgtgattgtgctccgcggagacgcggggcaagggaaatctttatcaagtcaggttattgcccaggccgtctccaagaccattttcggtcggcaatctgtgtattcccttccccccgattcggatttctttgatggctatgaaaatcagtttgcagcaataatggatgatctagggcaaaatcctgatggctctgatttcactacgttctgtcagatggtttcgactaccaattttctccccaatatggctagtctagagagaaagggcaccccctttacatctcagcttgtggtggcaactaccaatctgcctgagtttagacctgtcacaatagcccattaccctgctgttgagagaaggataactttcgactattcagtgtctgctggtccagtctgctccaaaacagaggccgggtataaggttttggatgttgaaagagcctttaggcctaccggtgaggctcctcttccatgcttccagaataactgccttttccttgagaaagctgggctccagttcagagataaccgaactaaagagatcatttccctggtagatgtgattgagagagccgtggctaggattgaaaggaagaagaaagttctcacaaccgtgcagacccttgtggcacaagctccagtagacgaggtcagtttccattccgtagtccagcagcttaaagcaagacaggaagcgacagatgaacagcttgaggaattgcaagaggctttcgcgaaagtacaggagcgtaactctgtgttttctgattggttgaagatttctgcaatgttgtgtgctgcgactctggcactttcccaagttgtcaagatggccaaggcggtgaagcagatggtcaagcctgatttggttcgtgtgcaattggatgagcaggagcagggaccttacaatgagacagcgagagctaaaccaaaaacactgcagttgttggacattcagggaccgaaccctgtgatggactttgaaaaatatgtagccaaacatgtaaccgcccccattgattttgtctaccccactggggtgagcacccagacttgcctccttgtgagaggccgcaccctggcagtaaatagacacatggccgagtctgactggacttccatagtagtgcgtggagtcacacacgcccgctctactgttaaaattttggccatagctaaagcaggcaaagagactgacgtatctttcatccgcctctcttctggtcctctattcagagacaatacatccaaatttgtcaaggctggtgatgtacttcctactggtgccgctccagtcacggggataatgaacacggacatacccatgatgtacacaggaaccttcctgaaagctggtgtgtcagtcccagtggaaaccggccagacctttaatcactgtattcattacaaggctaacacacgaaagggctggtgtggatcagccctactggcagatcttggaggaagcaagaaaatccttggcatccattctgctggctctatgggaatagccgccgcctcgattgtgtcacaggagatgattcgggcggtagtgaatgcctttgagccacagggtgctctcgagagattgccagatgggccccgtattcacgtaccacgtaaaacagcactacgccccaccgttgcccgtcaagtcttccaaccagcatatgccccggctgttctatcgaaatttgaccctagaacagaggctgatgtagatgaagtggctttctccaaacatacctccaaccaggaaagcctcccaccagtgtttagaatggtagccaaagagtatgccaatagagttttcaccttgctgggaaaagacaatggccgtctgactgtaaagcaggctttggaaggactggaggggatggaccccatggacaggaacacctccccggggcttccatatactgcgctaggaatgcgcagaacagatgtcgtagattgggaatcagccaccctgatcccgtttgcggcagaaagattaagaaaaatgaatgaaggagacttttccgaagttgtctatcaaacattcctcaaggatgagcttagaccgatagaaaaggttcaagccgccaagacacggattgtagatgttccaccatttgagcattgcattctgggtagacaattgttgggaaagtttgcatcaaagttccagacccaaccgggtctggaactaggatcagccattggatgtgacccagatgtacactggactgccttcggtgtcgccatgcaaggttttgagcgtgtctacgatgtggactactccaactttgattcgacccattcggtggcaatgttccgcttattggctgaggaatttttcactccagagaatggttttgaccccctgactagagaatatcttgagtcattagccatttcaacccatgcgtttgaggagaagcgctttctgataaccggtggtctcccatcaggttgtgcagcgacctcaatgctaaacactataatgaataatataataattagggcgggtttgtatctcacgtataaaaattttgaatttgatgatgtgaaggtgttgtcgtacggagatgatctccttgtggccacaaattaccaattggattttgataaggtgagagcaagcctcgcaaagacaggatataagataactcccgctaacaaaacttctacctttcctcttaattcgacgcttgaagacgttgtcttcttaaaaagaaagtttaagaaagagggccctctgtatcggcctgtcatgaacagagaggcgttggaagcaatgttgtcatactatcgtccagggactctatctgagaaactcacttcgatcactatgcttgccgttcattctggcaagcaggaatatgatcggctctttgccccattccgtgaggtaggggttgtcgtgccatcattcgagagtgtggagtacagatggaggagtctgttctggtagtagtgcagtcactggcacaacgcgttgcccggtaagccaatcgggtatacacggtcgtcatactgcagacagggttcttctactttgcaagatagtctagagtagtaaaataaatagtataag

SEQ ID NO: 16 - DNA, 7399 bp, Enterovirus Enterovirus B
ttaaaacagcctgtgggttgatcccacccacaggcccattgggcgctagcactctggtatcacggtacctttgtgcgcctgttttataccccctcccccaactgtaacttagaagtaacacacaccgatcaacagtcagcgtggcacaccagccacgttttgatcaagcacttctgttaccccggactgagtatcaatagactgctcacgcggttgaaggagaaagcgttcgttatccggccaactacttcgaaaaacctagtaacaccgtggaagttgcagagtgtttcgctcagcactaccccagtgtagatcaggtcgatgagtcaccgcattccccacgggcgaccgtggcggtggctgcgttggcggcctgcccatggggaaacccatgggacgctctaatacagacatggtgcgaagagtctattgagctagttggtagtcctccggcccctgaatgcggctaatcctaactgcggagcacacaccctcaagccagagggcagtgtgtcgtaacgggcaactctgcagcggaaccgactactttgggtgtccgtgtttcattttattcctatactggctgcttatggtgacaattgagagatcgttaccatatagctattggattggccatccggtgactaatagagctattatatatccctttgttgggtttataccacttagcttgaaagaggttaaaacattacaattcattgttaagttgaatacagcaaaatgggagctcaagtatcaacgcaaaagactggggcacatgagaccaggctgaatgctagcggcaattccatcattcactacacaaatattaattattacaaggatgccgcatccaactcagccaatcggcaggatttcactcaagacccgggcaagttcacagaaccagtgaaagatatcatgattaaatcactaccagctctcaactcccccacagtagaggagtgcggatacagtgacagggcgagatcaatcacattaggtaactccaccataacgactcaggaatgcgccaacgtggtggtgggctatggagtatggccagattatctaaaggatagtgaggcaacagcagaggaccaaccgacccaaccagacgttgccacatgtaggttctatacccttgactctgtgcaatggcagaaaacctcaccaggatggtggtggaagctgcccgatgctttgtcgaacttaggactgtttgggcagaacatgcagtaccactacttaggccgaactgggtataccgtacatgtgcagtgcaatgcatctaagttccaccaaggatgcttgctagtagtgtgtgtaccggaagctgagatgggttgcgcaacgctagacaacaccccatccagtgcagaattgctggggggcgatacggcaaaggagtttgcggacaaaccggtcgcatccgggtccaacaagttggtacagagggtggtgtataatgcaggcatgggggtgggtgttggaaacctcaccattttcccccaccaatggatcaacctacgcaccaataatagtgctacaattgtgatgccatacaccaacagtgtacctatggataacatgtttaggcataacaacgtcaccctaatggttatcccatttgtaccgctagattactgccctgggtccaccacgtacgtcccaattacggtcacgatagccccaatgtgtgccgagtacaatgggttacgtttagcagggcaccagggcttaccaaccatgaatactccggggagctgtcaatttctgacatcagacgacttccaatcaccatccgccatgccgcaatatgacgtcacaccagagatgaggatacctggtgaggtgaaaaacttgatggaaatagctgaggttgactcagttgtcccagtccaaaatgttggagagaaggtcaactctatggaagcataccagatacctgtgagatccaacgaaggatctggaacgcaagtattcggctttccactgcaaccagggtactcgagtgtttttagtcggacgctcctaggagagatcttgaactattatacacattggtcaggcagcataaagcttacgtttatgttctgtggttcggccatggctactggaaaattccttttggcatactcaccaccaggtgctggagctcctacaaaaagggttgatgctatgcttggtactcatgtaatttgggacgtggggctacaatcaagttgcgtgctgtgtataccctggataagccaaacacactaccggtttgttgcttcagatgagtataccgcagggggttttattacgtgctggtatcaaacaaacatagtggtcccagcggatgcccaaagctcctgttacatcatgtgtttcgtgtcagcatgcaatgacttctctgtcaggctattgaaggacactcctttcatttcgcagcaaaactttttccagggcccagtggaagacgcgataacagccgctatagggagagttgcggataccgtgggtacagggccaaccaactcagaagctataccagcactcactgctgctgagacgggtcacacgtcacaagtagtgccgggtgacactatgcagacacgccacgttaagaactaccattcaaggtccgagtcaaccatagagaacttcctatgtaggtcagcatgcgtgtactttacggagtataaaaactcaggtgccaagcggtatgctgaatgggtattaacaccacgacaagcagcacaacttaggagaaagctagaattctttacctacgtccggttcgacctggagctgacgtttgtcataacaagtactcaacagccctcaaccacacagaaccaagatgcacagatcctaacacaccaaattatgtatgtaccaccaggtggacctgtaccagataaagttgattcatacgtgtggcaaacatctacgaatcccagtgtgttttggaccgagggaaacgccccgccgcgcatgtccataccgtttttgagcattggcaacgcctattcaaatttctatgacggatggtctgaattttccaggaacggagtttacggcatcaacacgctaaacaacatgggcacgctatatgcaagacatgtcaacgctggaagcacgggtccaataaaaagcaccattagaatctacttcaaaccgaagcatgtcaaagcgtggatacctagaccacctagactctgccaatacgagaaggcaaagaacgtgaacttccaacccagcggagttaccactactaggcaaagcatcactacaatgacaaatacgggcgcatttggacaacaatcaggggcagtgtatgtggggaactacagggtggtaaatagacatctagctaccagtgctgactggcaaaactgtgtgtgggaaagttacaacagagacctcttagtgagcacgaccacagcacatggatgtgatattatagccagatgtcagtgcacaacgggagtgtacttttgtgcgtccaaaaacaagcactacccaatttcgtttgaaggaccaggtctagtagaggtccaagagagtgaatactaccccaggagataccaatcccatgtgcttttagcagctggattttccgaaccaggtgactgtggcggtatcctaaggtgtgagcatggtgtcattggcattgtgaccatggggggtgaaggcgtggtcggctttgcagacatccgtgatctcctgtggctggaagatgatgcaatggaacagggagtgaaggactatgtggaacagcttggaaatgcattcggctccggctttactaaccaaatatgtgagcaagtcaacctcctgaaagaatcactagtgggtcaagactccatcttagagaaatctctaaaagccttagttaagataatatcagccttagtaattgtggtgaggaaccacgatgacctgatcactgtgactgccacactagcccttatcggttgtacctcgtccccgtggcggtggctcaaacagaaggtgtcacaatattacggaatccctatggctgaacgccaaaacaatagctggcttaagaaatttactgaaatgacaaatgcttgcaagggtatggaatggatagctgtcaaaattcagaaattcattgaatggctcaaagtaaaaattttgccagaggtcagagaaaaacacgagttcctgaacagacttaaacaactccccttattagaaagtcagatcgccacaatcgagcagagcgcgccatcccaaagtgaccaggaacaattattttccaatgtccaatactttgcccactattgcagaaagtacgctcccctctacgcagctgaagcaaagagggtgttctcccttgagaagaagatgagcaattacatacagttcaagtccaaatgccgtattgaacctgtatgtttgctcctgcacgggagccctggtgccggcaagtcggtggcaacaaacttaattggaaggtcgcttgctgagaaactcaacagctcagtgtactcactaccgccagacccagatcacttcgacggatacaaacagcaggccgtggtgattatggacgatctatgccagaatcctgatgggaaagacgtctccttgttctgccaaatggtttccagtgtagattttgtaccacccatggctgccctagaagagaaaggcattctgttcacctcaccgtttgtcttggcatcgaccaatgcaggatctattaatgctccaaccgtgtcagatagcagagccttggcaaggagatttcactttgacatgaacatcgaggttatttccatgtacagtcagaatggcaagataaacatgcccatgtcagtcaagacttgtgacgatgagtgttgcccggtcaattttaaaaagtgctgccctcttgtgtgtgggaaggctatacaattcattgatagaagaacacaggtcagatactctctagacatgctagtcaccgagatgtttagggagtacaatcatagacatagcgtggggaccacgcttgaggcactgttccagggaccaccagtatacagagagatcaaaattagcgttgcaccagagacaccaccaccgcccgccattgcggacctgctcaaatcggtagacagtgaggctgtgagggagtactgcaaagaaaaaggatggttggttcctgagatcaactccaccctccaaattgagaaacatgtcagtcgggctttcatttgcttacaggcattgaccacatttgtgtcagtggctggaatcatatatataatatataagctctttgcgggttttcaaggtgcttatacaggagtgcccaaccagaagcccagagtgcctaccctgaggcaagcaaaagtgcaaggccctgcctttgagttcgccgtcgcaatgatgaaaaggaactcaagcacggtgaaaactgaatatggcgagtttaccatgctgggcatctatgacaggtgggccgttttgccacgccacgccaaacctgggccaaccatcttgatgaatgatcaagaggttggtgtgctagatgccaaggagctagtagacaaggacggcaccaacttagaactgacactactcaaattgaaccggaatgagaagttcagagacatcagaggcttcttagccaaggaggaagtggaggttaatgaggcagtgctagcaattaacaccagcaagtttcccaacatgtacattccagtaggacaggtcacagaatacggcttcctaaacctaggtggcacacccaccaagagaatgcttatgtacaacttccccacaagagcaggccagtgtggtggagtgctcatgtccaccggcaaggtactgggtatccatgttggtggaaatggccatcagggcttctcagcagcactcctcaaacactacttcaatgatgagcaaggtgaaatagaatttattgagagctcaaaggacgccgggtttccagtcatcaacacaccaagtaaaacaaagttggagcctagtgttttccaccaggtctttgaggggaacaaagaaccagcagtactcaggagtggggatccacgtctcaaggccaattttgaagaggctatattttccaagtatataggaaatgtcaacacacacgtggatgagtacatgctggaagcagtggaccactacgcaggccaactagccaccctagatatcagcactgaaccaatgaaactggaggacgcagtgtacggtaccgagggtcttgaggcgcttgatctaacaacgagtgccggttacccatatgttgcactgggtatcaagaagagggacatcctctctaagaagactaaggacctaacaaagttaaaggaatgtatggacaagtatggcctgaacctaccaatggtgacttatgtaaaagatgagctcaggtccatagagaaggtagcgaaaggaaagtctaggctgattgaggcgtccagtttgaatgattcagtggcgatgagacagacatttggtaatctgtacaaaactttccacctaaacccaggggttgtgactggtagtgctgttgggtgtgacccagacctcttttggagcaagataccagtgatgttagatggacatctcatagcatttgattactctgggtacgatgctagcttaagccctgtctggtttgcttgcctaaaaatgttacttgagaagcttggatacacgcacaaagagacaaactacattgactacttgtgcaactcccatcacctgtacagggataaacattactttgtgaggggtggcatgccctcgggatgttctggtaccagtattttcaactcaatgattaacaatatcataattaggacactaatgctaaaagtgtacaaagggattgacttggaccaattcaggatgatcgcatatggtgatgatgtgatcgcatcgtacccatggcctatagatgcatctttactcgctgaagctggtaagggttacgggctgatcatgacaccagcagataagggagagtgctttaacgaagttacctggaccaacgccactttcctaaagaggtattttagagcagatgaacagtaccccttcctggtgcatcctgttatgcccatgaaagacatacacgaatcaattagatggaccaaggatccaaagaacacccaagatcacgtgcgctcactgtgtctattagcttggcataacggggagcacgaatatgaggagttcatccgtaaaattagaagcgtcccagtcggacgttgtttgaccctccccgcgttttcaactctacgcaggaagtggttggactccttttagattagagacaatttgaaataatttagattggcttaaccctactgtgctaaccgaaccagataacggtacagtaggggtaaattctccgcattcggtgcgg

SEQ ID NO: 17 - DNA, 7405 bp, Enterovirus Enterovirus C
ttaaaacagctctggggttgttcccaccccagaggcccacgtggcggctagtactctggtatcacggtacctttgtacgcctgttttatatcccttcccccgtaactttagaagtttaacaaaagttcaatagcaggggtgcaaaccagtacctccacgaacaagcacttctgtctccccggtgaagtcacatagactgtacccacggtcaaaagtgattgatccgttatccgcttgagtacttcgagaagcctagtaccaccttgggatcttcgatgcgttgcgctcaacactataccccgagtgtagcttaggctgatgagtctgggcgtcccccaccggtgacggtggcccaggctgcgttggcggcctacccatggctaacgccacgggacgctagttgtgaacaaggtgtgaagagcctattgagctactcaagagtcctccggcccctgaatgcggctaatcccaaccacggagcaatcgctcacgacccagtgagtaggttgtcgtaatgcgcaagtccgtggcggaaccgactactttgggtgtccgtgtttccctttttacttatactggctgcttatggtgacaatttacagattgttaccatatagctattggattggccatccagtattgtgttacatatattaaaatactttactacaagcaacaacaacattgtgtttgaaccacaatagctactaagaatgggggctcaagtgtcaactcaaaagactggtgcgcatgaaaatcaaaacttggctgctaatggatccaccattaattacactactatcaactactacaaagatagtgcaagtaactcggccaccagacaagatctttcccaagatccatcaaaatttacagaaccagttaaagatctaatgctgaaaacagcaccagccttaaattcgccaaatgtggaagcgtgtggatacagcgaccgtgtaagacaaattaccctgggaaactcgactatcaccacacaagaagcagctaatgctattgttgcttatggtgagtggcctacttacataaatgactcagaggcaaacccagtagatgcacccactgaaccagatgttagcagcaataggttctatactttggactcagtgtcttggaagactacctcaaggggttggtggtggaaactaccggattgtctaaaagacatggggatgtttggtcagaatatgtattaccattacttggggcgctctggttataccattcatgtccagtgtaatgcctcaaagtttcaccaaggggcattaggaattttcttgataccagagtttgttatggcatgtaataccgagagcaaaacatcatatgtttcatacattaacgcaaatcctggtgagaggggcggtgagttcacaaacatctacaatccatcaagcacagatgctagtcagggcagacaatttgcagcgctagactacttactgggttccggtgttttagctggaaatgcatttgtgtacccgcaccagatcattaacttgcgtaccaataacagtgcaacaattgtggtaccatatgtaaactcacttgtcattgattgcatggcaaaacacaataactggggcattgtcatcctgccactggcgccactggcctttgctgcaacatcgtcaccacaggtgcctattacagttaccattgcacccatgtgcgcagaattcaatgggttgagaaacatcaccattccagtgcatcaaggattgccaacaatgaacacacctggttccaatcagtttctcacatctgatgacttccagtcaccctgcgccttacccaattttgacgtcactccaccaatacacatacccggagaagtgaagaacatgatggaactggccgagattgatacgctgatcccaatgaatgcagtggacgggaaggtgaacactatggaaatgtatcaaataccattaaatgacgaattgagcaaaacacccatattttgcctgtctctgtcacctgcttctgacaaacgattaagtcatacaatgttgggtgaaattctaaattattacactcattggacagggtccattaggttcacctttctattctgtggtagcatgatggccactggtaagctacttctcagttattccccaccaggagctaaaccaccaaccaatcgcaaagatgcaatgttgggcacacacatcatctgggacctgggtttacaatccagttgctccatggttgcaccatggatctctaatacagtatacaggcggtgtgcacgtgatgacttcacagaaggcgggtttataacttgcttttatcaaactagaattgttgtgcctgcctcaacccctaccagcatgttcatgttaggctttgtgagcgcatgcccagatttcagtgtcagactgctgagggacacttcccacattagtcaatcaaaacttatagcacgctcacaaggcattgaagatctcatcgattcagcaataaagaatgctctgagagtgtcccaaccatctacggcccagtcaactgaagcaaccagtggagcgaacagtcaggaagtgccagcactaactgctgtggaaacaggagcatctggtcaggcaattcccagtgacgtgatggaaaccagacatgtaataaactacaaaactaggtctgagtcatgtcttgaatcattctttgggagagctgcatgtgttacaatcttatctttgaccaactcttccaagagtggagaggagaagaaacatttcaacatttggaacatcacatacaccgatactgtgcagctacgcagaaaattggagtttttcacatattccagatttgaccttgaaatgacttttgtgttcacagagaactatcccagtacagctagtggagaagtgcgcaaccaggtataccagattatgtatattccaccaggggcaccccgaccatcatcctgggatgattatacatggcaatcctcctccaatccttccatcttctacatgtatggaaacgcaccaccacggatgtcaattccttatgtgggaattgctaatgcctattcacacttttatgacggatttgcacgagtgccacttgagggtgagaacactgatgctggtgacacgttttatggattggtatccataaatgattttggagtcctagcggtcagagcagtaaaccgcagcaatccacatacaatacacacatccgtgagagtgtacatgaaaccaaaacacattcggtgctggtgccccagaccccctcgcgcagtactatacagaggggaaggagtagatatgatatccagtgcaattttacccctgactaaagtggactctatcactacctttggatttggccaccaaaacaaggcagtgtatgttgctggttacaagatctgcaattaccacctagcaacccctagtgatcatctaaatgcaattagtgtgttgtgggatagggatttaatggtggtggagtctagagcccaagggactgacaccatagccaggtgtagttgcaggtgtggggtctattactgtgaatcaagaaagaaatattaccctgtcactttcactggtccaacattccgattcatggaagcgaacgactactacccagcaagataccagtctcacatgctaataggatgtggatttgcagagcctggggactgtggcgggatactaagatgcactcatggagtgattggcattattactgcagggggtgaaggagtagtagcctttgctgacatcagggacctttgggtgtatgaagaggaagccatggaacagggaataacaagctacattgaatcccttggcacagcctttggtgcagggttcacccatacaattagtgaaaaagtgactgagttaactacaatgattaccagtaccattatagaaaaactactgaaaaacttggtaaaaatagtatcagctctagtaattgttgtaagaaattatgaagatactaccacagttcttgcaacactagcattgcttgggtgtgatatgtctccttggcagtggttgaagaagaaggcatgtgacctactagagattcctcacgtgctgcgtcagggtgatgggtggatgaaaaaattcacagaggcttgcaatgcagctaaagggcttagatggattagcaacaaaatctccaagtttatagattggttgaagtgcaaaattattccagaagccaaagataaggtggaatttctcaccaagctgaaacagttggacatgttagaaaatcaaattgcaaccattcaccagtcttgccccagccaagagcaacaagagattctcttcaacaatgtgagatggttagcagtccagtcccgtcggtttgcaccgctatacgctgtggaagcacgaagaattagcaaaatggagaacacaataaacaactacatacagttcaagagcaaacaccgtattgaaccagtatgtatgctcatccatggatcaccggggacaggcaaatcaatagccacctcattgataggcagagcgatagcagagaaggagaatacgtcagtttactcaatgccacctgacccgtctcacttcgatggctacaaacaacaaggggtcgtgattatggatgatttaaaccagaaccctgatggtatggatatgaaactgttctgccaaatggtgtcaacagtggagttcatcccaccgatggcctcattggaggagaagggcatcttgttcacatctgattatgtcctggcttccaccaactcccattcaatagcaccacccacggtagctcacagtgatgccttaaccagacgatttgcatttgatgttgaagtttacacaatgtcagaacactcaatcaaaggcaaattgaacatggccacagccacccagttgtgtaaggattgtccaacacctgcaaattttaaaaagtgttgccctcttgtctgtggtaaggccttgcagctaatggatagatataccagacagagattcaccgtggatgaaatcactactttaattatgaatgagaaaaacaggagggctaacattggtaactgcatggaagccttgttccaagggccgctgaggtacaaggatctgaaaattgatgtgaagacagttcccccccctgaatgcatcagtgacctgctacaagcagtagattctcaagaggttagagattactgtgaaaagaagggctggatagtcaatattactagccaaatacagttggaaagaaatatcaacagggccatgactatactccaagctgtgactacgtttgcggcagtcgcaggagtggtgtacgtgatgtacaagctctttgctggccaacagggcgcatacactggtctgccaagcaaaaagcccaatgtcccaacaatcagagctgccaaagtacagggaccagggtttgactatgcagtagcaatggccaaaagaaacatacttactgcaaccaccactaagggtgaattcactatgttaggggtgcatgataatgtagcgatattaccaacccacgccgccccaggagaaactatcattattggtgggaaagaagtggagattttggatgccagagccctagaagatcaagcgggaaccaatcttgagattaccataatcactctaaaaagaaatgagaagtttagagatatcagaccacatattcccacccaaatcactgaaaccaatgatggagtgttgatcgtgaacactagtaagtaccctaatatgtatgtccctgttggtgctgtgaccgaacaggggtatctcaatctcagtggacgccaaactgctcgtactctgatgtacaacttcccaacacgagcaggccagtgcgggggaattattacttgcactggtaaagtcattgggatgcatgttggtgggaacggttcacatgggtttgcggcagcccttaagcgatcatacttcacccaaaatcaaggcgaaatccaatggatgaggtcatcaaaagaggtgggataccctattataaatgccccatcaaaaacaaagttagaacccagtgctttccactatgtctttgaaggtgttaaagaaccagcagtgctcaccaaaaatgaccctagactgaaaacagatttcgaggaagccatcttttcaaaatatgtagggaataaaattgttgaagtggacgaatacatgaaagaagcagtggatcactatgcagggcagctaatgtcattggacatcaacacagaacaaatgtgcttggaggatgccatgtacggcactgatggtcttgaagcactagatcttagcaccagtgcaggatacccttatgttgcaatggggaaaaagaaaagagatatcttagataaacagactagagataccaaagagatgcagaaacttctagacacttatgggatcaacctaccattagttacctatgttaaagatgaactcagatcaaagactaaagtggaacaaggaaaatcaaggctaattgaagcttccagccttaatgattcagttgcaatgagaatggcattcggcaatctttatgcaactttccataagaatccaggtgtggtaacaggctcagcagttggttgtgacccagacttattttggagtaagataccagtactaatggaagagaaactctttgcttttgattatacaggatatgatgcctcacttagtcctgcttggtttgaagctcttaaaatggtgttagaaaagattggttttggtgatagaacagattacatagactacctgaaccactctcatcatctttacaaaaacaaaacttattgtgttaagggcggtatgccatctggctgttctggcacatcaatttttaactcaatgattaataatctgatcatcaggacgcttttactgaaaacctacaagggcatggatttagaccatttaaaaatgattgcctatggtgatgatgtgatagcttcctacccccatgaggttgacgctagtctcctagcccaatcaggaaaagactacggactgaccatgactccagctgataaatcagcaacctttgaaacagtcacatgggagaatgtaacgttcctgaaaagatttttcagagcagatgagaaatatccattcttagtgcatccagtaatgccaatgaaagaaattcatgaatcaatcagatggaccaaggaccccagaaatacacaagatcatgtgcgctcgttgtgcttattggcctggcacaacggcgaagaagaatacaacaaattcttagctaaaatcagaagtgtgccgatcggtagagctttactgctcccagagtactctacattgtaccgccggtggcttgattcgttttagtaaccctacctcagtcgaattggattgggttatactgttgtaggggtaaatttttctttaattcggag

SEQ ID NO: 18 - DNA, 7452 bp, Enterovirus Enterovirus B
tttaaaacagcctgtgggttgttcccacccacaggcgccaccgggcgttagcacactggtatcacggtacccttgtgcgcctgttttataaccccaccccgagtaaaccttagaagcaatgcacctctggtcaatagtaggtgtgacacaccagtcacatcgtgaccaagcacttctgtctccccggactgagtatcaataggctgctcgcgcggctgaaggagaaagcgttcgttacccggccagctacttcgagaagcctagtaacaccatgaaggttgcagagtgtttcgctcagcacttcccctgtgtagatcaggccgatgagtcaccgcgttcctcacgggcgaccgtggcggtcgctgcgctggtggcctgcctatggggcaacccataggacgctctaatgctgacatggtgcgaagagtctattgagctagctggtagtcctccggcccctgaatgcggctaatcccaactgcggagcacgcaccctcaaaccagggggcagcgtgtcgtaacgggcaactctgcagcggaaccgactactttgggtgtccgtgtttctttttattcctatattggctgcttatggtgacaattgagagattgttaccatatagctattggattggccatccggtgagcaacagagctattgtgtatctgtttactggtttcataccccttaattacaaagaagtcaaaacccttcacttgatcttgttattcaatacaacaaaatgggagctcaagtgtcaacacagaaaactggagctcatgaaaccagtttaagtgcggcaggtaattcaattatacattatacgaacatcaactactataaagatgctgcgtctaattcggctaatcggcaagactttacacaagacccgagtaagtttacagagcctgttaaagatgttatgattaagtctttacctgccctcaactcaccaacagtagaagagtgcgggtacagcgatcgggttaggtccatcacccttggaaactccacgataaccacgcaggagtgtgctaacgtggtggtggggtatggtagatggcccacttacctcagggacgacgaggcgactgccgaggatcaacccacacagcctgacgtagcaacatgccgcttttatactttagattcaatcaagtgggaaaagggatcggtggggtggtggtggaagttcccagaagcgcttagtgatatgggattattcggtcagaacatgcaataccactacctgggtcgtgcagggtacactattcacctacaatgtaacgcttccaagttccatcaagggtgtttgctagtagtgtgtgtgcccgaggctgagatgggaggagctgtggttggacaagcattttccgccaccgcgatggcaaatggtgataaagcatatgagttcactagcgcaacccaaagtgatcagacaaaagttcaaactgctatacacaatgcagggatgggcgtaggtgtagggaacctcactatctacccgcaccagtggataaatttgcgcaccaacaacagtgccaccatagtgatgccatatattaatagtgtgcccatggacaacatgttcagacattataattttaccctgatggtgataccttttgtgaaactggactatgccgacaccgcatccacgtacgtgccaattacagtgacggtggccccaatgtgtgcggagtataacggcttacgtctggcacaagcgcaaggtttgccaactatgaacacaccaggaagcacgcaattcctaacatcagatgactttcaatcgccgtgcgctttgccacaatttgatgtgacgcctagtatgaacatcccaggagaagtgaagaacctaatggaaatagcagaagtggactcggtcgtgcccgtgaacaatgtccaagacaccactgaccaaatggagatgttcaggataccagtgaccataaatgcccctctacaacaacaggtttttggcctcagattgcaaccaggcttagatagtgtgtttaagcacactctgttgggagaaattctaaactactatgcgcactggtcaggcagcatgaagctgacatttgtgttttgcgggtctgcaatggcaacagggaaatttttaatagcatattcaccacctggggccaaccccccgaaaacacgaaaggatgcaatgctgggaacacatatcatatgggacattggtttacaatctagctgtgtgttgtgtgtgccatggatcagtcaaacacattataggcttgtacagcaggatgagtacaccagcgctggttacgtgacgtgttggtatcagactggtatgattgtcccaccaggaaccccaaattctagctctattatgtgctttgcatcagcgtgcaacgacttctcagtaagaatgttgagggacacaccattcatatcccaggataataagctgcaaggggatgtggaagaagccattgagagggcacgttgtacagttgctgacaccatgcgtacggggcctagcaattccgcgagcgtacctgcactcactgcagttgagacagggcacacctcgcaagttactccaagtgacactatgcagacaagacatgtgaaaaactatcattcgcgctctgagtcgactgtggagaatttcctcggtcggtcggcatgcgtgtacatggaagagtacaagaccactgataagcatgttaacaagaaattcgtcgcctggccaatcaacacaaaacaaatggttcagatgcggaggaagctggaaatgttcacttatcttaggtttgatatggaggtaacttttgtgatcacaagtcgacaagaccccggaacaaccctagctcaggacatgcccgtgttgacgcgccaaatcatgtatgtgccacctggcggtccgattccagcaaaagttgatgattatgcctggcagacgtctacaaaccccagcattttctggacggaaggaaacgcaccagcgcgcatgtccatcccatttatcagcataggaaatgcatacagcaatttttatgacgggtggtcaaattttgatcagaggggctcatacgggtacaataccctgaataacttaggtcacatatatgtgagacacgtgagtggaagtagtcctcacccaatcacgagcactattagagtgtatttcaagccaaaacataccagagcttgggtgccgcgccctccaaggctatgccaatacaagaaggcatttagcgtggatttcacgccaactcccattacagacaccaggaaagacatcaacactgtaaccaccgtggcgcaaagtcggcgtcggggtgacatgtccacccttaacacgcatggtgccttcggacaacaatccggggccgtctatgtgggcaactacagagtgatcaacagacacctggcaacacacacggattggcaaaattgcgtgtgggaggattacaatagagacctccttgtgagcacgactacagcgcacgggtgtgatgtcatagctagatgccagtgtacaaccggggtgtacttttgtgcatccaagaacaagcactaccctgtttcattcgaagggccaggtttagtggaagtccaagagagtgaatactaccctaaaagatatcaatcccatgtacttctggcagcaggattttccgaaccaggggactgtggtggcatcttaaggtgtgaacacggtgtcataggcatcgtaaccatgggaggcgaaggtgttgtgggttttgctgacgtgcgcgacctcttatggttagaggatgacgctatggagcagggtgtgaaggactacgtggagcaacttggaaatgcatttggttcaggcttcaccaatcagatctgtgagcaagttaaccttttaaaagaatcactagtgggtcaagactccatcttagagaaatctctaaaagccctagtcaagataatatcagccttagtgatcgtggtgaggaaccacgatgacctaattacagtgactgccatactagccctcatcggttgcacctcgtctccatggcggtggcttaaacagaaagtgtcacagtattatgggatacccatggctgaacgccaaaatgatagctggctcaagaaattcactgaaatgacaaatgcctgcaaacgaatggagtggatagccatcaaaattcagaagtttatagagtggctcaaagttaaaattctaccagaggtaagggagaagcatgagttcctgaacagacttaaacagcttcccctattagagagtcagattgccaccatcgagcagagtgcaccatcccaaagcgaccaagagcaattgttttccaatgtccagtactttgcacactattgcagaaagtatgcccccctctacgcagcagaggcaaagagggtgttctcccttgagaaaaagatgagcaattacatacagttcaagtccaaatgccgtattgagcctgtatgtttgctcctacatgggagtccaggtgccggcaagtcggtggcaacaaacctaattggaaggtcactcgctgagaaattaaacagttcagtgtactcattaccaccagacccagatcactttgatggctacaaacaacaggccgtagtgattatggatgacctatgccagaaccctgatggaaaagatgtctccttgttttgccaaatggtctctagtgtagattttgtgccgcccatggctgccttggaagagaagggcattttgttcacctctccgttcgttctggcatcgactaatgcaggatccataaatgctccaactgtgtcagacagcagggccttagcaaggaggtttcacttcgatatgaacattgaagttatctccatgtatagtcagaacggcaaaataaatatgccgatgtcagtgaagacgtgtgatgaagagtgctgtccagtcaactttaagaagtgttgccctctagtatgtggtaaagccatccagttcatagacagaagaacccaagttagatactcccttgacatgctggtaactgagatgtttagagagtataaccataggcatagtgtcggggccacccttgaggcattattccagggtccaccgatatatagagaaattaagatcagtgttgcgccagagacaccaccaccacctgtcatcgctgatctactcaagtcggtggacagtgaggatgtgagagagtactgcaaagaaaagggatggttgatccctgaggtaaactccaccctccaaattgaaaaatacgtcagtcgggctttcatttgcttgcaggcaataaccacattcgtgtcagtagctgggatcatctacataatatataagctctttgcaggctttcagggtgcatatacaggaatacccaatcagaaacctaaggtacctaccttaagacaagcaaaagtgcagggtcccgcatttgaattcgccgttgcaatgatgaagagaaactcaagcacggtgaagactgagtatggcgaattcaccatgctgggcatctatgacaggtgggccgtcttaccacgccacgctaagcctggaccaaccatcctgatgaatgaccaggaagtgggcgtgatggatgctaaggaattagtggataaggatggcacaaacctagaactgacattgcttaaattaaacaggaatgagaagttcagagacatcagaggcttcttagctaaggaggagatggaggtcaacgaagccgtgctagcaattaataccagtaaatttcccaacatgtacattccagtgggacaagtcacggactacggcttcctaaacctgggtggtacacccactaagagaatgctcatgtacaacttccccacaagagcaggtcagtgcggcggagtgctcatgtccactggcaaagtcttgggaatccatgttggtggaaatggtcatcaaggtttctcagcagcacttctcaagcactacttcaatgatgaacaaggagagatcgagttcattgagagttcaaaggatgcagggttcccgattatcaatacacctagtaagaccaagctggagccaagtgtcttccatcaagtttttgaaggtgtcaaagaaccagcggtcctcaggaatggtgatccacgcctcaaagctaattttgaggaagccatattttccaagtacatcggaaatgttaacacgcacgtggatgaatacatgctggaagctgttgatcattatgccggacaattggccaccctagatattagcactgaaccaatgaagttggaggatgctgtatacggtactgaaggtcttgaggctcttgacctaacaacgagtgcaggttacccttatgttgctctgggcatcaagaagagggacattctctcaaagaagaccagggacctgaccaagctgaaggagtgcatggacaagtatggcctaaacttgccaatgataacctatgtgaaagatcaactcagatctgcagagaaggtggcaaagggaaagtctaggctcattgaggcgtccagtttgaatgactccgtggcaatgagacagacattcggcaacctatacaaaacttttcacctaaacccagggattgtgactggcagtgccgtcgggtgtgacccggatctcttttggagtaaaataccagtaatgttaaacggtcacctcatagcctttgattactctggatatgatgctagcttgagtcctgtatggtttgcttgtctaaaactactacttgagaaacttggttactcgcacaaggagaccaattacattgattacctgtgcaactcccatcacctgtacagggacaagcattatttcgtgcggggtggcatgccatcaggatgttctggcacgagcatctttaactcaatgataaacaacatcataattaggacactcatgttgaaggtttacaaagggatcgacttggatcaattcaggatgattgcttatggtgacgatgtgatcgcatcatacccgtggcccatagatgcgtctttgcttgctgaagctggcaaggactatggattaatcatgacaccagcagacaaaggggagtgcttcaatgaagttacttggactaacgtcacattcctaaagaggtattttagagcagatgaacaatacccctttttagtgcaccctgttatgcctatgaaagacatacacgaatcaatcagatggaccaaggatccaaagaacacccaagaccacgtgcgctcgctatgcttattagcttggcacaacggggagcacgaatatgaggagttcattcgcaaaatcaggagcgtcccagttggacgttgtttgaccctacctgcgttctcaaccctacgcaggaagtggttggactctttctaaattagagacaatttgaactgatttgaattggctcaaccctactgtactaaccgaactagataacggtgcagtaggggtaaattctccgcattcggtgcggagg

SEQ ID NO: 19 - DNA, 10621 bp, Artificial Sequence
  NEP-BV-SVV-mCh
cgcccccctgacgagcatcacaaaaatcgacgctcaagtcagaggtggcgaaacccgacaggactataaagataccaggcgtttccccctggaagctccctcgtgcgctctcctgttccgaccctgccgcttaccggatacctgtccgcctttctcccttcgggaagcgtggcgctttctcatagctcacgctgtaggtatctcagttcggtgtaggtcgttcgctccaagctgggctgtgtgcacgaaccccccgttcagcccgaccgctgcgccttatccggtaactatcgtcttgagtccaacccggtaagacacgacttatcgccactggcagcagccactggtaacaggattagcagagcgaggtatgtaggcggtgctacagagttcttgaagtggtggcctaactacggctacactagaagaacagtatttggtatctgcgctctgctgaagccagttaccttcggaaaaagagttggtagctcttgatccggcaaacaaaccaccgctggtagcggtggtttttttgtttgcaagcagcagattacgcgcagaaaaaaaggatctcaagaagatccttttaaaaaaattcatccaacaaacgataaaatgcaatacgttgactatctggtgctgcaataccatataaaactaaaaaacgatctgcccattcaccacctaattcttctgcaatatcacgagttgctaatgcaatatcttgataacgatctgcaacacctaaacgaccacaatcaatgaaaccactaaaacgaccattttcaaccataatatttggtaaacatgcatcaccatgagtaacaactaaatcttcaccatctggcatacttgcttttaaacgtgcaaacaattctgctggtgctaaaccttgatgttcttcatctaaatcatcttgatcaactaaacctgcttccatacgagtacgtgcacgttcaatacgatgttttgcttgatgatcaaatggacaagttgctggatctaaagtatgtaaacgacgcattgcatctgccataatactaactttttctgctggtgctaaatgactagataacaaatcttgacctggaacttcacctaacaacaaccaatcacgacctgcttcagtaacaacatctaaaactgctgcacatggaacaccagtagttgctaaccaacttaaacgtgctgcttcatcttgtaattcatttaatgcaccacttaaatcagttttaacaaacaaaactggacgaccttgtgcacttaaacgaaaaactgctgcatcagaacaaccaatagtttgttgtgcccaatcataaccaaacaaacgttcaacccatgctgctggactacctgcatgtaaaccatcttgttcaatcatactcttcctttttcaatattattgaagcatttatcagggttattgtctcatgagcggatacatatttgaagaattcacattgattattgactagttattaatagtaatcaattacggggtcattagttcatagcccatatatggagttccgcgttacataacttacggtaaatggcccgcctggctgaccgcccaacgacccccgcccattgacgtcaataatgacgtatgttcccatagtaacgccaatagggactttccattgacgtcaatgggtggagtatttacggtaaactgcccacttggcagtacatcaagtgtatcatatgccaagtacgccccctattgacgtcaatgacggtaaatggcccgcctggcattatgcccagtacatgaccttatgggactttcctacttggcagtacatctacgtattagtcatcgctattaccatggtgatgcggttttggcagtacatcaatgggcgtggatagcggtttgactcacggggatttccaagtctccaccccattgacgtcaatgggagtttgttttggcaccaaaatcaacgggactttccaaaatgtcgtaacaactccgccccattgacgcaaatgggcggtaggcgtgtacggtgggaggtctatataagcagagctctctggctaactagagaacccactgcttactggcttatcgaaattaatacgactcactatagggagacccaagctggctagcgtttaaacttaagcttggtaccttatcaaactgatgagtccgtgaggacgaaacgagtaagctcgtctttgaaatggggggctgggccctgatgcccagtccttcctttccccttccggggggttaaccggctgtgtttgctagaggcacagaggggcaacatccaacctgcttttgcggggaacggtgcggctccgattcctgcgtcgccaaaggtgttagcgcacccaaacggcgcacctaccaatgttattggtgtggtctgcgagttctagcctactcgtttctcccccgaccattcactcacccacgaaaagtgtgttgtaaccataagatttaacccccgcacgggatgtgcgataaccgtaagactggctcaagcgcggaaagcgctgtaaccacatgctgttagtccctttatggctgcaagatggctacccacctcggatcactgaactggagctcgaccctccttagtaagggaaccgagaggccttcgtgcaacaagctccgacacagagtccacgtgactgctaccaccatgagtacatggttctcccctctcgacccaggacttctttttgaatatccacggctcgatccagagggtggggcatgacccctagcatagcgagctacagcgggaactgtagctaggccttagcgtgccttggatactgcctgatagggcgacggcctagtcgtgtcggttctataggtagcacatacaaatatgcagaactctcatttttctttcgatacagcctctggcacctttgaagatgtaaccggaacaaaagtcaagatcgttgaataccccagatcggtgaacaatggtgtttacgattcgtctactcatttggagatactgaacctacagggtgaaattgaaattttaaggtctttcaatgaataccaaattcgcgccgccaaacaacaactcggactggacatcgtgtacgaactacagggtaatgttcagacaacgtcaaagaatgattttgattcccgtggcaataatggtaacatgaccttcaattactacgcaaacacttatcagaattcagtagacttctcgacctcctcgtcggcgtcaggcgccggacctgggaactctcggggcggattagcgggtctcctcacaaatttcagtggaatcttgaaccctcttggctacctcaaagatcacaacaccgaagaaatggaaaactctgctgatcgagtcacaacgcaaacggcgggcaacactgccataaacacgcaatcatcattgggtgtgttgtgtgcctacgttgaagacccgaccaaatctgatcctccgtccagcagcacagatcaacccaccaccactttcactgccatcgacaggtggtacactggacgtctcaattcttggacaaaagctgtaaaaaccttctcttttcaggccgtcccgcttcccggtgcctttctgtctaggcagggaggcctcaacggaggggccttcacagctaccctacatagacactttttgatgaagtgcgggtggcaggtgcaggtccaatgtaatttgacacaattccaccaaggcgctcttcttgttgccatggttcctgaaaccacccttgatgtcaagcccgacggtaaggcaaagagcttacaggagctgaatgaagaacagtgggtggaaatgtctgacgattaccggaccgggaaaaacatgccttttcagtctcttggcacatactatcggccccctaactggacttggggtcccaatttcatcaacccctatcaagtaacggttttcccacaccaaattctgaacgcgagaacctctacctcggtagacataaacgtcccatacatcggggagacccccacgcaatcctcagagacacagaactcctggaccctcctcgttatggtgctcgttcccctagactataaggaaggagccacaactgacccagaaattacattttctgtaaggcctacaagtccctacttcaatgggcttcgcaaccgctacacggccgggacggacgaagaacaggggcccattcctacggcacccagagaaaattcgcttatgtttctctcaaccctccctgacgacactgtccctgcttacgggaatgtgcgtacccctcctgtcaattacctccctggtgaaataaccgaccttttgcaactggcccgcatacccactctcatggcatttgagcgggtgcctgaacccgtgcctgcctcagacacatatgtgccctacgttgccgttcccacccagttcgatgacaggcctctcatctccttcccgatcaccctttcagatcccgtctatcagaacaccctggttggcgccatcagttcaaatttcgccaattaccgtgggtgtatccaaatcactctgacattttgtggacccatgatggcgagagggaaattcctgctctcgtattctcccccaaatggaacgcaaccacagactctttccgaagctatgcagtgcacatactctatttgggacataggcttgaactctagttggaccttcgtcgtcccctacatctcgcccagtgactaccgtgaaactcgagccattaccaactcggtttactccgctgatggttggtttagcctgcacaagttgaccaaaattactctaccacctgactgtccgcaaagtccctgcattctctttttcgcttctgctggtgaggattacactctccgtctccccgttgattgtaatccttcctatgtgttccactccaccgacaacgccgagaccggggttattgaggcgggtaacactgacaccgatttctctggtgaactggcggctcctggctctaaccacactaatgtcaagttcctgtttgatcgatctcgattattgaatgtaatcaaggtactggagaaggacgccgttttcccccgccctttccctacacaagaaggtgcgcagcaggatgatggttacttttgtcttctgaccccccgcccaacagtcgcttcccgacccgccactcgtttcggcctgtacgccaatccgtccggcagtggtgttcttgctaacacttcactggacttcaatttttatagcttggcctgtttcacttactttagatcggaccttgaggttacggtggtctcactagagccggatctggaatttgctgtagggtggtttccttctggcagtgaataccaggcttccagctttgtctacgaccagctgcatgtgcccttccactttactgggcgcactccccgcgctttcgctagcaagggtgggaaggtatctttcgtgctcccttggaactctgtctcgtctgtgctccccgtgcgctgggggggggcttccaagctctcttctgctacgcggggtctaccggcgcatgctgattgggggactatttacgcctttgtcccccgtcctaatgagaagaaaagcaccgctgtaaaacacgtggccgtgtacattcggtacaagaacgcacgtgcctggtgccccagcatgcttccctttcgcagctacaagcagaagatgctgatgcaatctggcgatatcgagaccaatcccgggccgagcaagggcgaggaggataacatggccatcatcaaggagttcatgcgcttcaaggtgcacatggagggctccgtgaacggccacgagttcgagatcgagggcgagggcgagggccgcccctacgagggcacccagaccgccaagctgaaggtgaccaagggtggccccctgcccttcgcctgggacatcctgtcccctcagttcatgtacggctccaaggcctacgtgaagcaccccgccgacatccccgactacttgaagctgtccttccccgagggcttcaagtgggagcgcgtgatgaacttcgaggacggcggcgtggtgaccgtgacccaggactcctccctgcaggacggcgagttcatctacaaggtgaagctgcgcggcaccaacttcccctccgacggccccgtaatgcagaagaagaccatgggctgggaggcctcctccgagcggatgtaccccgaggacggcgccctgaagggcgagatcaagcagaggctgaagctgaaggacggcggccactacgacgctgaggtcaagaccacctacaaggccaagaagcccgtgcagctgcccggcgcctacaacgtcaacatcaagttggacatcacctcccacaacgaggactacaccatcgtggaacagtacgaacgcgccgagggccgccactccaccggcggcatggacgagctgtacaaggagggcagaggaagtctgctaacatgcggtgacgtcgaggagaatcccgggcctgcttctgacaacccaattttggagtttcttgaagcagaaaatgatctagtcactctggcctctctctggaagatggtgcactctgttcaacagacctggagaaagtatgtgaagaacgatgatttttggcccaatttactcagcgagctagtgggggaaggctctgtcgccttggccgccacgctatccaaccaagcttcagtaaaggctcttttgggcctgcactttctctctcgggggctcaattacactgacttttactctttactgatagagaaatgctctagtttctttaccgtagaaccacctcctccaccagctgaaaacctgatgaccaagccctcagtgaagtcgaaattccgaaaactgtttaagatgcaaggacccatggacaaagtcaaagactggaaccaaatagctgccggcttgaagaattttcaatttgttcgtgacctagtcaaagaggtggtcgattggctgcaggcctggatcaacaaagagaaagccagccctgtcctccagtaccagttggagatgaagaagctcgggcctgtggccttggctcatgacgctttcatggctggttccgggccccctcttagcgacgaccagattgaatacctccagaacctcaaatctcttgccctaacactggggaagactaatttggcccaaagtctcaccactatgatcaatgccaaacaaagttcagcccaacgagttgaacccgttgtggtggtccttagaggcaagccgggatgcggcaagagcttggcctctacgttgattgcccaggctgtgtccaagcgcctctatggctcccaaagtgtatattctcttcccccagatccagatttcttcgatggatacaaaggacagttcgtgaccttgatggatgatttgggacaaaacccggatggacaagatttctccaccttttgtcagatggtgtcgaccgcccaatttctccccaacatggcggaccttgcagagaaagggcgtccctttacctccaatctcatcattgcaactacaaatctcccccacttcagtcctgtcaccattgctgatccttctgcagtctctcgccgtatcaactacgatctgactctagaagtatctgaggcctacaagaaacacacacggctgaattttgacttggctttcaggcgcacagacgccccccccatttatccttttgctgcccatgtgccctttgtggacgtagctgtgcgcttcaaaaatggtcaccagaattttaatctcctagagttggtcgattccatttgtacagacattcgagccaagcaacaaggtgcccgaaacatgcagactctggttctacagagccccaacgagaatgatgacacccccgtcgacgaggcgttgggtagagttctctcccccgctgcggtcgatgaggcgcttgtcgacctcactccagaggccgacccggttggccgtttggctattcttgccaagctaggtcttgccctagctgcggtcacccctggtctgataatcttggcagtgggactctacaggtacttctctggctctgatgcagaccaagaagaaacagaaagtgagggatctgtcaaggcacccaggagcgaaaatgcttatgacggcccgaagaaaaactctaagccccctggagcactctctctcatggaaatgcaacagcccaacgtggacatgggctttgaggctgcggtcgctaagaaagtggtcgtccccattaccttcatggttcccaacagaccttctgggcttacacagtccgctcttctggtgaccggccggaccttcctaatcaatgaacatacatggtccaatccctcctggaccagcttcacaatccgcggtgaggtacacactcgtgatgagcccttccaaacggttcatttcactcaccacggtattcccacagatctgatgatggtacgtctcggaccgggcaattctttccctaacaatctagacaagtttggacttgaccagatgccggcacgcaactcccgtgtggttggcgtttcgtccagttacggaaacttcttcttctctggaaatttcctcggatttgttgattccatcacctctgaacaaggaacttacgcaagactctttaggtacagggtgacgacctacaaaggatggtgcggctcggccctggtctgtgaggccggtggcgtccgacgcatcattggcctgcattctgctggcgccgccggtatcggcgccgggacctatatctcaaaattaggactaatcaaagccctgaaacacctcggtgaacctttggccacaatgcaaggactgatgactgaattagagcctggaatcaccgtacatgtaccccggaaatccaaattgagaaagacgaccgcacacgcggtgtacaaaccggagtttgagcctgctgtgttgtcaaaatttgatcccagactgaacaaggatgttgacttggatgaagtaatttggtctaaacacactgccaatgtcccttaccaacctcctttgttctacacatacatgtcagagtacgctcatcgagtcttctccttcttggggaaagacaatgacattctgaccgtcaaagaagcaattctgggcatccccggactagaccccatggatccccacacagctccgggtctgccttacgccatcaacggccttcgacgtactgatctcgtcgattttgtgaacggtacagtagatgcggcgctggctgtacaaatccagaaattcttagacggtgactactctgaccatgtcttccaaacttttctgaaagatgagatcagaccctcagagaaagtccgagcgggaaaaacccgcattgttgatgtgccctccctggcgcattgcattgtgggcagaatgttgcttgggcgctttgctgccaagtttcaatcccatcctggctttctcctcggctctgctatcgggtctgaccctgatgttttctggaccgtcataggggctcaactcgaggggagaaagaacacgtatgacgtggactacagtgcctttgactcttcacacggcactggctccttcgaggctctcatctctcactttttcaccgtggacaatggttttagccctgcgctgggaccgtatctcagatccctggctgtctcggtgcacgcttacggcgagcgtcgcatcaagattaccggtggcctcccctccggttgtgccgcgaccagcctgctgaacacagtgctcaacaatgtgatcatcaggactgctctggcattgacttacaaggaatttgaatatgacatggttgatatcatcgcctacggtgacgaccttctggttggcacggattacgatctggacttcaatgaggtggcacgacgcgctgccaagttggggtataagatgactcctgccaacaagggttctgtcttccctccgacttcctctctttccgatgctgtttttctaaagcgcaaattcgtccaaaacaacgacggcttatacaaaccagttatggatttaaagaatttggaagccatgctctcctacttcaaaccaggaacactactcgagaagctgcaatctgtttctatgttggctcaacattctggaaaagaagaatatgatagattgatgcaccccttcgctgactacggtgccgtaccgagtcacgagtacctgcaggcaagatggagggccttgttcgactgacccagatagcccaaggcgcttcggtgctgccggcgattctgggagaactcagtcggaacagaaaagggaaaaaaaaaaaaaaaaaaaaaaaaaaaaaaggccggcatggtcccagcctcctcgctggcgccggctgggcaacatgcttcggcatggcgaatgggacgcggccgctcgagtctagagggcccgtttaaacccgctgatcagcctcgactgtgccttctagttgccagccatctgttgtttgcccctcccccgtgccttccttgaccctggaaggtgccactcccactgtcctttcctaataaaatgaggaaattgcatcgcattgtctgagtaggtgtcattctattctggggggtggggtggggcaggacagcaagggggaggattgggaagacaatagcaggcatgctggggatgcggtgggctctatggtgctggcgtttttccataggctc

SEQ ID NO: 20 - RNA, 8066 nt, Artificial Sequence
  NEP-BV-SVV-mCh_RNA
uuugaaauggggggcugggcccugaugcccaguccuuccuuuccccuuccgggggguuaaccggcuguguuugcuagaggcacagaggggcaacauccaaccugcuuuugcggggaacggugcggcuccgauuccugcgucgccaaagguguuagcgcacccaaacggcgcaccuaccaauguuauugguguggucugcgaguucuagccuacucguuucucccccgaccauucacucacccacgaaaaguguguuguaaccauaagauuuaacccccgcacgggaugugcgauaaccguaagacuggcucaagcgcggaaagcgcuguaaccacaugcuguuagucccuuuauggcugcaagauggcuacccaccucggaucacugaacuggagcucgacccuccuuaguaagggaaccgagaggccuucgugcaacaagcuccgacacagaguccacgugacugcuaccaccaugaguacaugguucuccccucucgacccaggacuucuuuuugaauauccacggcucgauccagaggguggggcaugaccccuagcauagcgagcuacagcgggaacuguagcuaggccuuagcgugccuuggauacugccugauagggcgacggccuagucgugucgguucuauagguagcacauacaaauaugcagaacucucauuuuucuuucgauacagccucuggcaccuuugaagauguaaccggaacaaaagucaagaucguugaauaccccagaucggugaacaaugguguuuacgauucgucuacucauuuggagauacugaaccuacagggugaaauugaaauuuuaaggucuuucaaugaauaccaaauucgcgccgccaaacaacaacucggacuggacaucguguacgaacuacaggguaauguucagacaacgucaaagaaugauuuugauucccguggcaauaaugguaacaugaccuucaauuacuacgcaaacacuuaucagaauucaguagacuucucgaccuccucgucggcgucaggcgccggaccugggaacucucggggcggauuagcgggucuccucacaaauuucaguggaaucuugaacccucuuggcuaccucaaagaucacaacaccgaagaaauggaaaacucugcugaucgagucacaacgcaaacggcgggcaacacugccauaaacacgcaaucaucauuggguguguugugugccuacguugaagacccgaccaaaucugauccuccguccagcagcacagaucaacccaccaccacuuucacugccaucgacaggugguacacuggacgucucaauucuuggacaaaagcuguaaaaaccuucucuuuucaggccgucccgcuucccggugccuuucugucuaggcagggaggccucaacggaggggccuucacagcuacccuacauagacacuuuuugaugaagugcggguggcaggugcagguccaauguaauuugacacaauuccaccaaggcgcucuucuuguugccaugguuccugaaaccacccuugaugucaagcccgacgguaaggcaaagagcuuacaggagcugaaugaagaacaguggguggaaaugucugacgauuaccggaccgggaaaaacaugccuuuucagucucuuggcacauacuaucggcccccuaacuggacuuggggucccaauuucaucaaccccuaucaaguaacgguuuucccacaccaaauucugaacgcgagaaccucuaccucgguagacauaaacgucccauacaucggggagacccccacgcaauccucagagacacagaacuccuggacccuccucguuauggugcucguuccccuagacuauaaggaaggagccacaacugacccagaaauuacauuuucuguaaggccuacaagucccuacuucaaugggcuucgcaaccgcuacacggccgggacggacgaagaacaggggcccauuccuacggcacccagagaaaauucgcuuauguuucucucaacccucccugacgacacugucccugcuuacgggaaugugcguaccccuccugucaauuaccucccuggugaaauaaccgaccuuuugcaacuggcccgcauacccacucucauggcauuugagcgggugccugaacccgugccugccucagacacauaugugcccuacguugccguucccacccaguucgaugacaggccucucaucuccuucccgaucacccuuucagaucccgucuaucagaacacccugguuggcgccaucaguucaaauuucgccaauuaccguggguguauccaaaucacucugacauuuuguggacccaugauggcgagagggaaauuccugcucucguauucucccccaaauggaacgcaaccacagacucuuuccgaagcuaugcagugcacauacucuauuugggacauaggcuugaacucuaguuggaccuucgucguccccuacaucucgcccagugacuaccgugaaacucgagccauuaccaacucgguuuacuccgcugaugguugguuuagccugcacaaguugaccaaaauuacucuaccaccugacuguccgcaaagucccugcauucucuuuuucgcuucugcuggugaggauuacacucuccgucuccccguugauuguaauccuuccuauguguuccacuccaccgacaacgccgagaccgggguuauugaggcggguaacacugacaccgauuucucuggugaacuggcggcuccuggcucuaaccacacuaaugucaaguuccuguuugaucgaucucgauuauugaauguaaucaagguacuggagaaggacgccguuuucccccgcccuuucccuacacaagaaggugcgcagcaggaugaugguuacuuuugucuucugaccccccgcccaacagucgcuucccgacccgccacucguuucggccuguacgccaauccguccggcagugguguucuugcuaacacuucacuggacuucaauuuuuauagcuuggccuguuucacuuacuuuagaucggaccuugagguuacgguggucucacuagagccggaucuggaauuugcuguagggugguuuccuucuggcagugaauaccaggcuuccagcuuugucuacgaccagcugcaugugcccuuccacuuuacugggcgcacuccccgcgcuuucgcuagcaagggugggaagguaucuuucgugcucccuuggaacucugucucgucugugcuccccgugcgcugggggggggcuuccaagcucucuucugcuacgcggggucuaccggcgcaugcugauugggggacuauuuacgccuuugucccccguccuaaugagaagaaaagcaccgcuguaaaacacguggccguguacauucgguacaagaacgcacgugccuggugccccagcaugcuucccuuucgcagcuacaagcagaagaugcugaugcaaucuggcgauaucgagaccaaucccgggccgagcaagggcgaggaggauaacauggccaucaucaaggaguucaugcgcuucaaggugcacauggagggcuccgugaacggccacgaguucgagaucgagggcgagggcgagggccgccccuacgagggcacccagaccgccaagcugaaggugaccaaggguggcccccugcccuucgccugggacauccuguccccucaguucauguacggcuccaaggccuacgugaagcaccccgccgacauccccgacuacuugaagcuguccuuccccgagggcuucaagugggagcgcgugaugaacuucgaggacggcggcguggugaccgugacccaggacuccucccugcaggacggcgaguucaucuacaaggugaagcugcgcggcaccaacuuccccuccgacggccccguaaugcagaagaagaccaugggcugggaggccuccuccgagcggauguaccccgaggacggcgcccugaagggcgagaucaagcagaggcugaagcugaaggacggcggccacuacgacgcugaggucaagaccaccuacaaggccaagaagcccgugcagcugcccggcgccuacaacgucaacaucaaguuggacaucaccucccacaacgaggacuacaccaucguggaacaguacgaacgcgccgagggccgccacuccaccggcggcauggacgagcuguacaaggagggcagaggaagucugcuaacaugcggugacgucgaggagaaucccgggccugcuucugacaacccaauuuuggaguuucuugaagcagaaaaugaucuagucacucuggccucucucuggaagauggugcacucuguucaacagaccuggagaaaguaugugaagaacgaugauuuuuggcccaauuuacucagcgagcuagugggggaaggcucugucgccuuggccgccacgcuauccaaccaagcuucaguaaaggcucuuuugggccugcacuuucucucucgggggcucaauuacacugacuuuuacucuuuacugauagagaaaugcucuaguuucuuuaccguagaaccaccuccuccaccagcugaaaaccugaugaccaagcccucagugaagucgaaauuccgaaaacuguuuaagaugcaaggacccauggacaaagucaaagacuggaaccaaauagcugccggcuugaagaauuuucaauuuguucgugaccuagucaaagagguggucgauuggcugcaggccuggaucaacaaagagaaagccagcccuguccuccaguaccaguuggagaugaagaagcucgggccuguggccuuggcucaugacgcuuucauggcugguuccgggcccccucuuagcgacgaccagauugaauaccuccagaaccucaaaucucuugcccuaacacuggggaagacuaauuuggcccaaagucucaccacuaugaucaaugccaaacaaaguucagcccaacgaguugaacccguuguggugguccuuagaggcaagccgggaugcggcaagagcuuggccucuacguugauugcccaggcuguguccaagcgccucuauggcucccaaaguguauauucucuucccccagauccagauuucuucgauggauacaaaggacaguucgugaccuugauggaugauuugggacaaaacccggauggacaagauuucuccaccuuuugucagauggugucgaccgcccaauuucuccccaacauggcggaccuugcagagaaagggcgucccuuuaccuccaaucucaucauugcaacuacaaaucucccccacuucaguccugucaccauugcugauccuucugcagucucucgccguaucaacuacgaucugacucuagaaguaucugaggccuacaagaaacacacacggcugaauuuugacuuggcuuucaggcgcacagacgccccccccauuuauccuuuugcugcccaugugcccuuuguggacguagcugugcgcuucaaaaauggucaccagaauuuuaaucuccuagaguuggucgauuccauuuguacagacauucgagccaagcaacaaggugcccgaaacaugcagacucugguucuacagagccccaacgagaaugaugacacccccgucgacgaggcguuggguagaguucucucccccgcugcggucgaugaggcgcuugucgaccucacuccagaggccgacccgguuggccguuuggcuauucuugccaagcuaggucuugcccuagcugcggucaccccuggucugauaaucuuggcagugggacucuacagguacuucucuggcucugaugcagaccaagaagaaacagaaagugagggaucugucaaggcacccaggagcgaaaaugcuuaugacggcccgaagaaaaacucuaagcccccuggagcacucucucucauggaaaugcaacagcccaacguggacaugggcuuugaggcugcggucgcuaagaaaguggucguccccauuaccuucaugguucccaacagaccuucugggcuuacacaguccgcucuucuggugaccggccggaccuuccuaaucaaugaacauacaugguccaaucccuccuggaccagcuucacaauccgcggugagguacacacucgugaugagcccuuccaaacgguucauuucacucaccacgguauucccacagaucugaugaugguacgucucggaccgggcaauucuuucccuaacaaucuagacaaguuuggacuugaccagaugccggcacgcaacucccgugugguuggcguuucguccaguuacggaaacuucuucuucucuggaaauuuccucggauuuguugauuccaucaccucugaacaaggaacuuacgcaagacucuuuagguacagggugacgaccuacaaaggauggugcggcucggcccuggucugugaggccgguggcguccgacgcaucauuggccugcauucugcuggcgccgccgguaucggcgccgggaccuauaucucaaaauuaggacuaaucaaagcccugaaacaccucggugaaccuuuggccacaaugcaaggacugaugacugaauuagagccuggaaucaccguacauguaccccggaaauccaaauugagaaagacgaccgcacacgcgguguacaaaccggaguuugagccugcuguguugucaaaauuugaucccagacugaacaaggauguugacuuggaugaaguaauuuggucuaaacacacugccaaugucccuuaccaaccuccuuuguucuacacauacaugucagaguacgcucaucgagucuucuccuucuuggggaaagacaaugacauucugaccgucaaagaagcaauucugggcauccccggacuagaccccauggauccccacacagcuccgggucugccuuacgccaucaacggccuucgacguacugaucucgucgauuuugugaacgguacaguagaugcggcgcuggcuguacaaauccagaaauucuuagacggugacuacucugaccaugucuuccaaacuuuucugaaagaugagaucagacccucagagaaaguccgagcgggaaaaacccgcauuguugaugugcccucccuggcgcauugcauugugggcagaauguugcuugggcgcuuugcugccaaguuucaaucccauccuggcuuucuccucggcucugcuaucgggucugacccugauguuuucuggaccgucauaggggcucaacucgaggggagaaagaacacguaugacguggacuacagugccuuugacucuucacacggcacuggcuccuucgaggcucucaucucucacuuuuucaccguggacaaugguuuuagcccugcgcugggaccguaucucagaucccuggcugucucggugcacgcuuacggcgagcgucgcaucaagauuaccgguggccuccccuccgguugugccgcgaccagccugcugaacacagugcucaacaaugugaucaucaggacugcucuggcauugacuuacaaggaauuugaauaugacaugguugauaucaucgccuacggugacgaccuucugguuggcacggauuacgaucuggacuucaaugagguggcacgacgcgcugccaaguugggguauaagaugacuccugccaacaaggguucugucuucccuccgacuuccucucuuuccgaugcuguuuuucuaaagcgcaaauucguccaaaacaacgacggcuuauacaaaccaguuauggauuuaaagaauuuggaagccaugcucuccuacuucaaaccaggaacacuacucgagaagcugcaaucuguuucuauguuggcucaacauucuggaaaagaagaauaugauagauugaugcaccccuucgcugacuacggugccguaccgagucacgaguaccugcaggcaagauggagggccuuguucgacugacccagauagcccaaggcgcuucggugcugccggcgauucugggagaacucagucggaacagaaaagggaaaaaaaaaaaaaaaaaaaaaaaaaaaaaa

SEQ ID NO: 21 - DNA, 9610 bp, Artificial Sequence
  NEP-BV-SVV-mCh Trunc1
cgcccccctgacgagcatcacaaaaatcgacgctcaagtcagaggtggcgaaacccgacaggactataaagataccaggcgtttccccctggaagctccctcgtgcgctctcctgttccgaccctgccgcttaccggatacctgtccgcctttctcccttcgggaagcgtggcgctttctcatagctcacgctgtaggtatctcagttcggtgtaggtcgttcgctccaagctgggctgtgtgcacgaaccccccgttcagcccgaccgctgcgccttatccggtaactatcgtcttgagtccaacccggtaagacacgacttatcgccactggcagcagccactggtaacaggattagcagagcgaggtatgtaggcggtgctacagagttcttgaagtggtggcctaactacggctacactagaagaacagtatttggtatctgcgctctgctgaagccagttaccttcggaaaaagagttggtagctcttgatccggcaaacaaaccaccgctggtagcggtggtttttttgtttgcaagcagcagattacgcgcagaaaaaaaggatctcaagaagatccttttaaaaaaattcatccaacaaacgataaaatgcaatacgttgactatctggtgctgcaataccatataaaactaaaaaacgatctgcccattcaccacctaattcttctgcaatatcacgagttgctaatgcaatatcttgataacgatctgcaacacctaaacgaccacaatcaatgaaaccactaaaacgaccattttcaaccataatatttggtaaacatgcatcaccatgagtaacaactaaatcttcaccatctggcatacttgcttttaaacgtgcaaacaattctgctggtgctaaaccttgatgttcttcatctaaatcatcttgatcaactaaacctgcttccatacgagtacgtgcacgttcaatacgatgttttgcttgatgatcaaatggacaagttgctggatctaaagtatgtaaacgacgcattgcatctgccataatactaactttttctgctggtgctaaatgactagataacaaatcttgacctggaacttcacctaacaacaaccaatcacgacctgcttcagtaacaacatctaaaactgctgcacatggaacaccagtagttgctaaccaacttaaacgtgctgcttcatcttgtaattcatttaatgcaccacttaaatcagttttaacaaacaaaactggacgaccttgtgcacttaaacgaaaaactgctgcatcagaacaaccaatagtttgttgtgcccaatcataaccaaacaaacgttcaacccatgctgctggactacctgcatgtaaaccatcttgttcaatcatactcttcctttttcaatattattgaagcatttatcagggttattgtctcatgagcggatacatatttgaagaattcacattgattattgactagttattaatagtaatcaattacggggtcattagttcatagcccatatatggagttccgcgttacataacttacggtaaatggcccgcctggctgaccgcccaacgacccccgcccattgacgtcaataatgacgtatgttcccatagtaacgccaatagggactttccattgacgtcaatgggtggagtatttacggtaaactgcccacttggcagtacatcaagtgtatcatatgccaagtacgccccctattgacgtcaatgacggtaaatggcccgcctggcattatgcccagtacatgaccttatgggactttcctacttggcagtacatctacgtattagtcatcgctattaccatggtgatgcggttttggcagtacatcaatgggcgtggatagcggtttgactcacggggatttccaagtctccaccccattgacgtcaatgggagtttgttttggcaccaaaatcaacgggactttccaaaatgtcgtaacaactccgccccattgacgcaaatgggcggtaggcgtgtacggtgggaggtctatataagcagagctctctggctaactagagaacccactgcttactggcttatcgaaattaatacgactcactatagggagacccaagctggctagcgtttaaacttaagcttggtaccttatcaaactgatgagtccgtgaggacgaaacgagtaagctcgtctttgaaatggggggctgggccctgatgcccagtccttcctttccccttccggggggttaaccggctgtgtttgctagaggcacagaggggcaacatccaacctgcttttgcggggaacggtgcggctccgattcctgcgtcgccaaaggtgttagcgcacccaaacggcgcacctaccaatgttattggtgtggtctgcgagttctagcctactcgtttctcccccgaccattcactcacccacgaaaagtgtgttgtaaccataagatttaacccccgcacgggatgtgcgataaccgtaagactggctcaagcgcggaaagcgctgtaaccacatgctgttagtccctttatggctgcaagatggctacccacctcggatcactgaactggagctcgaccctccttagtaagggaaccgagaggccttcgtgcaacaagctccgacacagagtccacgtgactgctaccaccatgagtacatggttctcccctctcgacccaggacttctttttgaatatccacggctcgatccagagggtggggcatgacccctagcatagcgagctacagcgggaactgtagctaggccttagcgtgccttggatactgcctgatagggcgacggcctagtcgtgtcggttctataggtagcacatacaaatatgcagaactctcatttttctttcgatacagcctctggcacctttgaagatgtaaccggaacaaaagtcaagatcgttgaataccccagatcggtgaacaatggtgtttacgattcgtctactcatttggagatactgaacctacagggtgaaattgaaattttaaggtctttcaatgaataccaaattcgcgccgccaaacaacaactcggactggacatcgtgtacgaactacagggtaatgttcagacaacgtcaaagaatgattttgattcccgtggcaataatggtaacatgaccttcaattactacgcaaacacttatcagaattcagtagacttctcgacctcctcgtcggcgtcaggcgccggacctgggaactctcggggcggattagcgggtctcctcacaaatttcagtggaatcttgaaccctcttggctacctcaaagatcacaacaccgaagaaatggaaaactctgctgatcgagtcacaacgcaaacggcgggcaacactgccataaacacgcaatcatcattgggtgtgttgtgtgcctacgttgaagacccgaccaaatctgatcctccgtccagcagcacagatcaacccaccaccactttcactgccatcgacaggtggtacactggacgtctcaattcttggacaaaagctgtaaaaaccttctcttttcaggccgtcccgcttcccggtgcctttctgtctaggcagggaggcctcaacggaggggccttcacagctaccctacatagacactttttgatgaagtgcgggtggcaggtgcaggtccaatgtaatttgacacaattccaccaaggcgctcttcttgttgccatggttcctgaaaccacccttgatgtcaagcccgacggtaaggcaaagagcttacaggagctgaatgaagaacagtgggtggaaatgtctgacgattaccggaccgggaaaaacatgccttttcagtctcttggcacatactatcggccccctaactggacttggggtcccaatttcatcaacccctatcaagtaacggttttcccacaccaaattctgaacgcgagaacctctacctcggtagacataaacgtcccatacatcggggagacccccacgcaatcctcagagacacagaactcctggaccctcctcgttatggtgctcgttcccctagactataaggaaggagccacaactgacccagaaattacattttctgtaaggcctacaagtccctacttcaatgggcttcgcaaccgctacacggccgggacggacgaagaacaggggcccattcctacggcacccagagaaaattcgcttatgtttctctcaaccctccctgacgacactgtccctgcttacgggaatgtgcgtacccctcctgtcaattacctccctggtgaaataaccgaccttttgcaactggcccgcatacccactctcatggcatttgagcgggtgcctgaacccgtgcctgcctcagacacatatgtgccctacgttgccgttcccacccagttcgatgacaggcctctcatctccttcccgatcaccctttcagatcccgtctatcagaacaccctggttggcgccatcagttcaaatttcgccaattaccgtgggtgtatccaaatcactctgacattttgtggacccatgatggcgagagggaaattcctgctctcgtattctcccccaaatggaacgcaaccacagactctttccgaagctatgcagtgcacatactctatttgggacataggcttgaactctagttggacctctggcgatatcgagaccaatcccgggccgagcaagggcgaggaggataacatggccatcatcaaggagttcatgcgcttcaaggtgcacatggagggctccgtgaacggccacgagttcgagatcgagggcgagggcgagggccgcccctacgagggcacccagaccgccaagctgaaggtgaccaagggtggccccctgcccttcgcctgggacatcctgtcccctcagttcatgtacggctccaaggcctacgtgaagcaccccgccgacatccccgactacttgaagctgtccttccccgagggcttcaagtgggagcgcgtgatgaacttcgaggacggcggcgtggtgaccgtgacccaggactcctccctgcaggacggcgagttcatctacaaggtgaagctgcgcggcaccaacttcccctccgacggccccgtaatgcagaagaagaccatgggctgggaggcctcctccgagcggatgtaccccgaggacggcgccctgaagggcgagatcaagcagaggctgaagctgaaggacggcggccactacgacgctgaggtcaagaccacctacaaggccaagaagcccgtgcagctgcccggcgcctacaacgtcaacatcaagttggacatcacctcccacaacgaggactacaccatcgtggaacagtacgaacgcgccgagggccgccactccaccggcggcatggacgagctgtacaaggagggcagaggaagtctgctaacatgcggtgacgtcgaggagaatcccgggcctgcttctgacaacccaattttggagtttcttgaagcagaaaatgatctagtcactctggcctctctctggaagatggtgcactctgttcaacagacctggagaaagtatgtgaagaacgatgatttttggcccaatttactcagcgagctagtgggggaaggctctgtcgccttggccgccacgctatccaaccaagcttcagtaaaggctcttttgggcctgcactttctctctcgggggctcaattacactgacttttactctttactgatagagaaatgctctagtttctttaccgtagaaccacctcctccaccagctgaaaacctgatgaccaagccctcagtgaagtcgaaattccgaaaactgtttaagatgcaaggacccatggacaaagtcaaagactggaaccaaatagctgccggcttgaagaattttcaatttgttcgtgacctagtcaaagaggtggtcgattggctgcaggcctggatcaacaaagagaaagccagccctgtcctccagtaccagttggagatgaagaagctcgggcctgtggccttggctcatgacgctttcatggctggttccgggccccctcttagcgacgaccagattgaatacctccagaacctcaaatctcttgccctaacactggggaagactaatttggcccaaagtctcaccactatgatcaatgccaaacaaagttcagcccaacgagttgaacccgttgtggtggtccttagaggcaagccgggatgcggcaagagcttggcctctacgttgattgcccaggctgtgtccaagcgcctctatggctcccaaagtgtatattctcttcccccagatccagatttcttcgatggatacaaaggacagttcgtgaccttgatggatgatttgggacaaaacccggatggacaagatttctccaccttttgtcagatggtgtcgaccgcccaatttctccccaacatggcggaccttgcagagaaagggcgtccctttacctccaatctcatcattgcaactacaaatctcccccacttcagtcctgtcaccattgctgatccttctgcagtctctcgccgtatcaactacgatctgactctagaagtatctgaggcctacaagaaacacacacggctgaattttgacttggctttcaggcgcacagacgccccccccatttatccttttgctgcccatgtgccctttgtggacgtagctgtgcgcttcaaaaatggtcaccagaattttaatctcctagagttggtcgattccatttgtacagacattcgagccaagcaacaaggtgcccgaaacatgcagactctggttctacagagccccaacgagaatgatgacacccccgtcgacgaggcgttgggtagagttctctcccccgctgcggtcgatgaggcgcttgtcgacctcactccagaggccgacccggttggccgtttggctattcttgccaagctaggtcttgccctagctgcggtcacccctggtctgataatcttggcagtgggactctacaggtacttctctggctctgatgcagaccaagaagaaacagaaagtgagggatctgtcaaggcacccaggagcgaaaatgcttatgacggcccgaagaaaaactctaagccccctggagcactctctctcatggaaatgcaacagcccaacgtggacatgggctttgaggctgcggtcgctaagaaagtggtcgtccccattaccttcatggttcccaacagaccttctgggcttacacagtccgctcttctggtgaccggccggaccttcctaatcaatgaacatacatggtccaatccctcctggaccagcttcacaatccgcggtgaggtacacactcgtgatgagcccttccaaacggttcatttcactcaccacggtattcccacagatctgatgatggtacgtctcggaccgggcaattctttccctaacaatctagacaagtttggacttgaccagatgccggcacgcaactcccgtgtggttggcgtttcgtccagttacggaaacttcttcttctctggaaatttcctcggatttgttgattccatcacctctgaacaaggaacttacgcaagactctttaggtacagggtgacgacctacaaaggatggtgcggctcggccctggtctgtgaggccggtggcgtccgacgcatcattggcctgcattctgctggcgccgccggtatcggcgccgggacctatatctcaaaattaggactaatcaaagccctgaaacacctcggtgaacctttggccacaatgcaaggactgatgactgaattagagcctggaatcaccgtacatgtaccccggaaatccaaattgagaaagacgaccgcacacgcggtgtacaaaccggagtttgagcctgctgtgttgtcaaaatttgatcccagactgaacaaggatgttgacttggatgaagtaatttggtctaaacacactgccaatgtcccttaccaacctcctttgttctacacatacatgtcagagtacgctcatcgagtcttctccttcttggggaaagacaatgacattctgaccgtcaaagaagcaattctgggcatccccggactagaccccatggatccccacacagctccgggtctgccttacgccatcaacggccttcgacgtactgatctcgtcgattttgtgaacggtacagtagatgcggcgctggctgtacaaatccagaaattcttagacggtgactactctgaccatgtcttccaaacttttctgaaagatgagatcagaccctcagagaaagtccgagcgggaaaaacccgcattgttgatgtgccctccctggcgcattgcattgtgggcagaatgttgcttgggcgctttgctgccaagtttcaatcccatcctggctttctcctcggctctgctatcgggtctgaccctgatgttttctggaccgtcataggggctcaactcgaggggagaaagaacacgtatgacgtggactacagtgcctttgactcttcacacggcactggctccttcgaggctctcatctctcactttttcaccgtggacaatggttttagccctgcgctgggaccgtatctcagatccctggctgtctcggtgcacgcttacggcgagcgtcgcatcaagattaccggtggcctcccctccggttgtgccgcgaccagcctgctgaacacagtgctcaacaatgtgatcatcaggactgctctggcattgacttacaaggaatttgaatatgacatggttgatatcatcgcctacggtgacgaccttctggttggcacggattacgatctggacttcaatgaggtggcacgacgcgctgccaagttggggtataagatgactcctgccaacaagggttctgtcttccctccgacttcctctctttccgatgctgtttttctaaagcgcaaattcgtccaaaacaacgacggcttatacaaaccagttatggatttaaagaatttggaagccatgctctcctacttcaaaccaggaacactactcgagaagctgcaatctgtttctatgttggctcaacattctggaaaagaagaatatgatagattgatgcaccccttcgctgactacggtgccgtaccgagtcacgagtacctgcaggcaagatggagggccttgttcgactgacccagatagcccaaggcgcttcggtgctgccggcgattctgggagaactcagtcggaacagaaaagggaaaaaaaaaaaaaaaaaaaaaaaaaaaaaaggccggcatggtcccagcctcctcgctggcgccggctgggcaacatgcttcggcatggcgaatgggacgcggccgctcgagtctagagggcccgtttaaacccgctgatcagcctcgactgtgccttctagttgccagccatctgttgtttgcccctcccccgtgccttccttgaccctggaaggtgccactcccactgtcctttcctaataaaatgaggaaattgcatcgcattgtctgagtaggtgtcattctattctggggggtggggtggggcaggacagcaagggggaggattgggaagacaatagcaggcatgctggggatgcggtgggctctatggtgctggcgtttttccataggctc

SEQ ID NO: 22 - RNA, 7055 nt, Artificial Sequence
  NEP-BV-SVV-mCh Trunc1 RNA
uuugaaauggggggcugggcccugaugcccaguccuuccuuuccccuuccgggggguuaaccggcuguguuugcuagaggcacagaggggcaacauccaaccugcuuuugcggggaacggugcggcuccgauuccugcgucgccaaagguguuagcgcacccaaacggcgcaccuaccaauguuauugguguggucugcgaguucuagccuacucguuucucccccgaccauucacucacccacgaaaaguguguuguaaccauaagauuuaacccccgcacgggaugugcgauaaccguaagacuggcucaagcgcggaaagcgcuguaaccacaugcuguuagucccuuuauggcugcaagauggcuacccaccucggaucacugaacuggagcucgacccuccuuaguaagggaaccgagaggccuucgugcaacaagcuccgacacagaguccacgugacugcuaccaccaugaguacaugguucuccccucucgacccaggacuucuuuuugaauauccacggcucgauccagaggguggggcaugaccccuagcauagcgagcuacagcgggaacuguagcuaggccuuagcgugccuuggauacugccugauagggcgacggccuagucgugucgguucuauagguagcacauacaaauaugcagaacucucauuuuucuuucgauacagccucuggcaccuuugaagauguaaccggaacaaaagucaagaucguugaauaccccagaucggugaacaaugguguuuacgauucgucuacucauuuggagauacugaaccuacagggugaaauugaaauuuuaaggucuuucaaugaauaccaaauucgcgccgccaaacaacaacucggacuggacaucguguacgaacuacaggguaauguucagacaacgucaaagaaugauuuugauucccguggcaauaaugguaacaugaccuucaauuacuacgcaaacacuuaucagaauucaguagacuucucgaccuccucgucggcgucaggcgccggaccugggaacucucggggcggauuagcgggucuccucacaaauuucaguggaaucuugaacccucuuggcuaccucaaagaucacaacaccgaagaaauggaaaacucugcugaucgagucacaacgcaaacggcgggcaacacugccauaaacacgcaaucaucauuggguguguugugugccuacguugaagacccgaccaaaucugauccuccguccagcagcacagaucaacccaccaccacuuucacugccaucgacaggugguacacuggacgucucaauucuuggacaaaagcuguaaaaaccuucucuuuucaggccgucccgcuucccggugccuuucugucuaggcagggaggccucaacggaggggccuucacagcuacccuacauagacacuuuuugaugaagugcggguggcaggugcagguccaauguaauuugacacaauuccaccaaggcgcucuucuuguugccaugguuccugaaaccacccuugaugucaagcccgacgguaaggcaaagagcuuacaggagcugaaugaagaacaguggguggaaaugucugacgauuaccggaccgggaaaaacaugccuuuucagucucuuggcacauacuaucggcccccuaacuggacuuggggucccaauuucaucaaccccuaucaaguaacgguuuucccacaccaaauucugaacgcgagaaccucuaccucgguagacauaaacgucccauacaucggggagacccccacgcaauccucagagacacagaacuccuggacccuccucguuauggugcucguuccccuagacuauaaggaaggagccacaacugacccagaaauuacauuuucuguaaggccuacaagucccuacuucaaugggcuucgcaaccgcuacacggccgggacggacgaagaacaggggcccauuccuacggcacccagagaaaauucgcuuauguuucucucaacccucccugacgacacugucccugcuuacgggaaugugcguaccccuccugucaauuaccucccuggugaaauaaccgaccuuuugcaacuggcccgcauacccacucucauggcauuugagcgggugccugaacccgugccugccucagacacauaugugcccuacguugccguucccacccaguucgaugacaggccucucaucuccuucccgaucacccuuucagaucccgucuaucagaacacccugguuggcgccaucaguucaaauuucgccaauuaccguggguguauccaaaucacucugacauuuuguggacccaugauggcgagagggaaauuccugcucucguauucucccccaaauggaacgcaaccacagacucuuuccgaagcuaugcagugcacauacucuauuugggacauaggcuugaacucuaguuggaccucuggcgauaucgagaccaaucccgggccgagcaagggcgaggaggauaacauggccaucaucaaggaguucaugcgcuucaaggugcacauggagggcuccgugaacggccacgaguucgagaucgagggcgagggcgagggccgccccuacgagggcacccagaccgccaagcugaaggugaccaaggguggcccccugcccuucgccugggacauccuguccccucaguucauguacggcuccaaggccuacgugaagcaccccgccgacauccccgacuacuugaagcuguccuuccccgagggcuucaagugggagcgcgugaugaacuucgaggacggcggcguggugaccgugacccaggacuccucccugcaggacggcgaguucaucuacaaggugaagcugcgcggcaccaacuuccccuccgacggccccguaaugcagaagaagaccaugggcugggaggccuccuccgagcggauguaccccgaggacggcgcccugaagggcgagaucaagcagaggcugaagcugaaggacggcggccacuacgacgcugaggucaagaccaccuacaaggccaagaagcccgugcagcugcccggcgccuacaacgucaacaucaaguuggacaucaccucccacaacgaggacuacaccaucguggaacaguacgaacgcgccgagggccgccacuccaccggcggcauggacgagcuguacaaggagggcagaggaagucugcuaacaugcggugacgucgaggagaaucccgggccugcuucugacaacccaauuuuggaguuucuugaagcagaaaaugaucuagucacucuggccucucucuggaagauggugcacucuguucaacagaccuggagaaaguaugugaagaacgaugauuuuuggcccaauuuacucagcgagcuagugggggaaggcucugucgccuuggccgccacgcuauccaaccaagcuucaguaaaggcucuuuugggccugcacuuucucucucgggggcucaauuacacugacuuuuacucuuuacugauagagaaaugcucuaguuucuuuaccguagaaccaccuccuccaccagcugaaaaccugaugaccaagcccucagugaagucgaaauuccgaaaacuguuuaagaugcaaggacccauggacaaagucaaagacuggaaccaaauagcugccggcuugaagaauuuucaauuuguucgugaccuagucaaagagguggucgauuggcugcaggccuggaucaacaaagagaaagccagcccuguccuccaguaccaguuggagaugaagaagcucgggccuguggccuuggcucaugacgcuuucauggcugguuccgggcccccucuuagcgacgaccagauugaauaccuccagaaccucaaaucucuugcccuaacacuggggaagacuaauuuggcccaaagucucaccacuaugaucaaugccaaacaaaguucagcccaacgaguugaacccguuguggugguccuuagaggcaagccgggaugcggcaagagcuuggccucuacguugauugcccaggcuguguccaagcgccucuauggcucccaaaguguauauucucuucccccagauccagauuucuucgauggauacaaaggacaguucgugaccuugauggaugauuugggacaaaacccggauggacaagauuucuccaccuuuugucagauggugucgaccgcccaauuucuccccaacauggcggaccuugcagagaaagggcgucccuuuaccuccaaucucaucauugcaacuacaaaucucccccacuucaguccugucaccauugcugauccuucugcagucucucgccguaucaacuacgaucugacucuagaaguaucugaggccuacaagaaacacacacggcugaauuuugacuuggcuuucaggcgcacagacgccccccccauuuauccuuuugcugcccaugugcccuuuguggacguagcugugcgcuucaaaaauggucaccagaauuuuaaucuccuagaguuggucgauuccauuuguacagacauucgagccaagcaacaaggugcccgaaacaugcagacucugguucuacagagccccaacgagaaugaugacacccccgucgacgaggcguuggguagaguucucucccccgcugcggucgaugaggcgcuugucgaccucacuccagaggccgacccgguuggccguuuggcuauucuugccaagcuaggucuugcccuagcugcggucaccccuggucugauaaucuuggcagugggacucuacagguacuucucuggcucugaugcagaccaagaagaaacagaaagugagggaucugucaaggcacccaggagcgaaaaugcuuaugacggcccgaagaaaaacucuaagcccccuggagcacucucucucauggaaaugcaacagcccaacguggacaugggcuuugaggcugcggucgcuaagaaaguggucguccccauuaccuucaugguucccaacagaccuucugggcuuacacaguccgcucuucuggugaccggccggaccuuccuaaucaaugaacauacaugguccaaucccuccuggaccagcuucacaauccgcggugagguacacacucgugaugagcccuuccaaacgguucauuucacucaccacgguauucccacagaucugaugaugguacgucucggaccgggcaauucuuucccuaacaaucuagacaaguuuggacuugaccagaugccggcacgcaacucccgugugguuggcguuucguccaguuacggaaacuucuucuucucuggaaauuuccucggauuuguugauuccaucaccucugaacaaggaacuuacgcaagacucuuuagguacagggugacgaccuacaaaggauggugcggcucggcccuggucugugaggccgguggcguccgacgcaucauuggccugcauucugcuggcgccgccgguaucggcgccgggaccuauaucucaaaauuaggacuaaucaaagcccugaaacaccucggugaaccuuuggccacaaugcaaggacugaugacugaauuagagccuggaaucaccguacauguaccccggaaauccaaauugagaaagacgaccgcacacgcgguguacaaaccggaguuugagccugcuguguugucaaaauuugaucccagacugaacaaggauguugacuuggaugaaguaauuuggucuaaacacacugccaaugucccuuaccaaccuccuuuguucuacacauacaugucagaguacgcucaucgagucuucuccuucuuggggaaagacaaugacauucugaccgucaaagaagcaauucugggcauccccggacuagaccccauggauccccacacagcuccgggucugccuuacgccaucaacggccuucgacguacugaucucgucgauuuugugaacgguacaguagaugcggcgcuggcuguacaaauccagaaauucuuagacggugacuacucugaccaugucuuccaaacuuuucugaaagaugagaucagacccucagagaaaguccgagcgggaaaaacccgcauuguugaugugcccucccuggcgcauugcauugugggcagaauguugcuugggcgcuuugcugccaaguuucaaucccauccuggcuuucuccucggcucugcuaucgggucugacccugauguuuucuggaccgucauaggggcucaacucgaggggagaaagaacacguaugacguggacuacagugccuuugacucuucacacggcacuggcuccuucgaggcucucaucucucacuuuuucaccguggacaaugguuuuagcccugcgcugggaccguaucucagaucccuggcugucucggugcacgcuuacggcgagcgucgcaucaagauuaccgguggccuccccuccgguugugccgcgaccagccugcugaacacagugcucaacaaugugaucaucaggacugcucuggcauugacuuacaaggaauuugaauaugacaugguugauaucaucgccuacggugacgaccuucugguuggcacggauuacgaucuggacuucaaugagguggcacgacgcgcugccaaguugggguauaagaugacuccugccaacaaggguucugucuucccuccgacuuccucucuuuccgaugcuguuuuucuaaagcgcaaauucguccaaaacaacgacggcuuauacaaaccaguuauggauuuaaagaauuuggaagccaugcucuccuacuucaaaccaggaacacuacucgagaagcugcaaucuguuucuauguuggcucaacauucuggaaaagaagaauaugauagauugaugcaccccuucgcugacuacggugccguaccgagucacgaguaccugcaggcaagauggagggccuuguucgacugacccagauagcccaaggcgcuucggugcugccggcgauucugggagaacucagucggaacagaaaagggaaaaaaaaaaaaaaaaaaaaaaaaaaaaaa

SEQ ID NO: 23 - DNA, 8827 bp, Artificial Sequence
  NEP-BV-SVV-mCh Trunc2
cgcccccctgacgagcatcacaaaaatcgacgctcaagtcagaggtggcgaaacccgacaggactataaagataccaggcgtttccccctggaagctccctcgtgcgctctcctgttccgaccctgccgcttaccggatacctgtccgcctttctcccttcgggaagcgtggcgctttctcatagctcacgctgtaggtatctcagttcggtgtaggtcgttcgctccaagctgggctgtgtgcacgaaccccccgttcagcccgaccgctgcgccttatccggtaactatcgtcttgagtccaacccggtaagacacgacttatcgccactggcagcagccactggtaacaggattagcagagcgaggtatgtaggcggtgctacagagttcttgaagtggtggcctaactacggctacactagaagaacagtatttggtatctgcgctctgctgaagccagttaccttcggaaaaagagttggtagctcttgatccggcaaacaaaccaccgctggtagcggtggtttttttgtttgcaagcagcagattacgcgcagaaaaaaaggatctcaagaagatccttttaaaaaaattcatccaacaaacgataaaatgcaatacgttgactatctggtgctgcaataccatataaaactaaaaaacgatctgcccattcaccacctaattcttctgcaatatcacgagttgctaatgcaatatcttgataacgatctgcaacacctaaacgaccacaatcaatgaaaccactaaaacgaccattttcaaccataatatttggtaaacatgcatcaccatgagtaacaactaaatcttcaccatctggcatacttgcttttaaacgtgcaaacaattctgctggtgctaaaccttgatgttcttcatctaaatcatcttgatcaactaaacctgcttccatacgagtacgtgcacgttcaatacgatgttttgcttgatgatcaaatggacaagttgctggatctaaagtatgtaaacgacgcattgcatctgccataatactaactttttctgctggtgctaaatgactagataacaaatcttgacctggaacttcacctaacaacaaccaatcacgacctgcttcagtaacaacatctaaaactgctgcacatggaacaccagtagttgctaaccaacttaaacgtgctgcttcatcttgtaattcatttaatgcaccacttaaatcagttttaacaaacaaaactggacgaccttgtgcacttaaacgaaaaactgctgcatcagaacaaccaatagtttgttgtgcccaatcataaccaaacaaacgttcaacccatgctgctggactacctgcatgtaaaccatcttgttcaatcatactcttcctttttcaatattattgaagcatttatcagggttattgtctcatgagcggatacatatttgaagaattcacattgattattgactagttattaatagtaatcaattacggggtcattagttcatagcccatatatggagttccgcgttacataacttacggtaaatggcccgcctggctgaccgcccaacgacccccgcccattgacgtcaataatgacgtatgttcccatagtaacgccaatagggactttccattgacgtcaatgggtggagtatttacggtaaactgcccacttggcagtacatcaagtgtatcatatgccaagtacgccccctattgacgtcaatgacggtaaatggcccgcctggcattatgcccagtacatgaccttatgggactttcctacttggcagtacatctacgtattagtcatcgctattaccatggtgatgcggttttggcagtacatcaatgggcgtggatagcggtttgactcacggggatttccaagtctccaccccattgacgtcaatgggagtttgttttggcaccaaaatcaacgggactttccaaaatgtcgtaacaactccgccccattgacgcaaatgggcggtaggcgtgtacggtgggaggtctatataagcagagctctctggctaactagagaacccactgcttactggcttatcgaaattaatacgactcactatagggagacccaagctggctagcgtttaaacttaagcttggtaccttatcaaactgatgagtccgtgaggacgaaacgagtaagctcgtctttgaaatggggggctgggccctgatgcccagtccttcctttccccttccggggggttaaccggctgtgtttgctagaggcacagaggggcaacatccaacctgcttttgcggggaacggtgcggctccgattcctgcgtcgccaaaggtgttagcgcacccaaacggcgcacctaccaatgttattggtgtggtctgcgagttctagcctactcgtttctcccccgaccattcactcacccacgaaaagtgtgttgtaaccataagatttaacccccgcacgggatgtgcgataaccgtaagactggctcaagcgcggaaagcgctgtaaccacatgctgttagtccctttatggctgcaagatggctacccacctcggatcactgaactggagctcgaccctccttagtaagggaaccgagaggccttcgtgcaacaagctccgacacagagtccacgtgactgctaccaccatgagtacatggttctcccctctcgacccaggacttctttttgaatatccacggctcgatccagagggtggggcatgacccctagcatagcgagctacagcgggaactgtagctaggccttagcgtgccttggatactgcctgatagggcgacggcctagtcgtgtcggttctataggtagcacatacaaatatgcagaactctcatttttctttcgatacagcctctggcacctttgaagatgtaaccggaacaaaagtcaagatcgttgaataccccagatcggtgaacaatggtgtttacgattcgtctactcatttggagatactgaacctacagggtgaaattgaaattttaaggtctttcaatgaataccaaattcgcgccgccaaacaacaactcggactggacatcgtgtacgaactacagggtaatgttcagacaacgtcaaagaatgattttgattcccgtggcaataatggtaacatgaccttcaattactacgcaaacacttatcagaattcagtagacttctcgacctcctcgtcggcgtcaggcgccggacctgggaactctcggggcggattagcgggtctcctcacaaatttcagtggaatcttgaaccctcttggctacctcaaagatcacaacaccgaagaaatggaaaactctgctgatcgagtcacaacgcaaacggcgggcaacactgccataaacacgcaatcatcattgggtgtgttgtgtgcctacgttgaagacccgaccaaatctgatcctccgtccagcagcacagatcaacccaccaccactttcactgccatcgacaggtggtacactggacgtctcaattcttggacaaaagctgtaaaaaccttctcttttcaggccgtcccgcttcccggtgcctttctgtctaggcagggaggcctcaacggaggggccttcacagctaccctacatagacactttttgatgaagtgcgggtggcaggtgcaggtccaatgtaatttgacacaattccaccaaggcgctcttcttgttgccatggttcctgaaaccacccttgatgtcaagcccgacggtaaggcaaagagcttacaggagctgaatgaagaacagtgggtggaaatgtctgacgattaccggaccgggaaaaacatgccttttcagtctcttggcacatactatcggccccctaactggacttggtctggcgatatcgagaccaatcccgggccgagcaagggcgaggaggataacatggccatcatcaaggagttcatgcgcttcaaggtgcacatggagggctccgtgaacggccacgagttcgagatcgagggcgagggcgagggccgcccctacgagggcacccagaccgccaagctgaaggtgaccaagggtggccccctgcccttcgcctgggacatcctgtcccctcagttcatgtacggctccaaggcctacgtgaagcaccccgccgacatccccgactacttgaagctgtccttccccgagggcttcaagtgggagcgcgtgatgaacttcgaggacggcggcgtggtgaccgtgacccaggactcctccctgcaggacggcgagttcatctacaaggtgaagctgcgcggcaccaacttcccctccgacggccccgtaatgcagaagaagaccatgggctgggaggcctcctccgagcggatgtaccccgaggacggcgccctgaagggcgagatcaagcagaggctgaagctgaaggacggcggccactacgacgctgaggtcaagaccacctacaaggccaagaagcccgtgcagctgcccggcgcctacaacgtcaacatcaagttggacatcacctcccacaacgaggactacaccatcgtggaacagtacgaacgcgccgagggccgccactccaccggcggcatggacgagctgtacaaggagggcagaggaagtctgctaacatgcggtgacgtcgaggagaatcccgggcctgcttctgacaacccaattttggagtttcttgaagcagaaaatgatctagtcactctggcctctctctggaagatggtgcactctgttcaacagacctggagaaagtatgtgaagaacgatgatttttggcccaatttactcagcgagctagtgggggaaggctctgtcgccttggccgccacgctatccaaccaagcttcagtaaaggctcttttgggcctgcactttctctctcgggggctcaattacactgacttttactctttactgatagagaaatgctctagtttctttaccgtagaaccacctcctccaccagctgaaaacctgatgaccaagccctcagtgaagtcgaaattccgaaaactgtttaagatgcaaggacccatggacaaagtcaaagactggaaccaaatagctgccggcttgaagaattttcaatttgttcgtgacctagtcaaagaggtggtcgattggctgcaggcctggatcaacaaagagaaagccagccctgtcctccagtaccagttggagatgaagaagctcgggcctgtggccttggctcatgacgctttcatggctggttccgggccccctcttagcgacgaccagattgaatacctccagaacctcaaatctcttgccctaacactggggaagactaatttggcccaaagtctcaccactatgatcaatgccaaacaaagttcagcccaacgagttgaacccgttgtggtggtccttagaggcaagccgggatgcggcaagagcttggcctctacgttgattgcccaggctgtgtccaagcgcctctatggctcccaaagtgtatattctcttcccccagatccagatttcttcgatggatacaaaggacagttcgtgaccttgatggatgatttgggacaaaacccggatggacaagatttctccaccttttgtcagatggtgtcgaccgcccaatttctccccaacatggcggaccttgcagagaaagggcgtccctttacctccaatctcatcattgcaactacaaatctcccccacttcagtcctgtcaccattgctgatccttctgcagtctctcgccgtatcaactacgatctgactctagaagtatctgaggcctacaagaaacacacacggctgaattttgacttggctttcaggcgcacagacgccccccccatttatccttttgctgcccatgtgccctttgtggacgtagctgtgcgcttcaaaaatggtcaccagaattttaatctcctagagttggtcgattccatttgtacagacattcgagccaagcaacaaggtgcccgaaacatgcagactctggttctacagagccccaacgagaatgatgacacccccgtcgacgaggcgttgggtagagttctctcccccgctgcggtcgatgaggcgcttgtcgacctcactccagaggccgacccggttggccgtttggctattcttgccaagctaggtcttgccctagctgcggtcacccctggtctgataatcttggcagtgggactctacaggtacttctctggctctgatgcagaccaagaagaaacagaaagtgagggatctgtcaaggcacccaggagcgaaaatgcttatgacggcccgaagaaaaactctaagccccctggagcactctctctcatggaaatgcaacagcccaacgtggacatgggctttgaggctgcggtcgctaagaaagtggtcgtccccattaccttcatggttcccaacagaccttctgggcttacacagtccgctcttctggtgaccggccggaccttcctaatcaatgaacatacatggtccaatccctcctggaccagcttcacaatccgcggtgaggtacacactcgtgatgagcccttccaaacggttcatttcactcaccacggtattcccacagatctgatgatggtacgtctcggaccgggcaattctttccctaacaatctagacaagtttggacttgaccagatgccggcacgcaactcccgtgtggttggcgtttcgtccagttacggaaacttcttcttctctggaaatttcctcggatttgttgattccatcacctctgaacaaggaacttacgcaagactctttaggtacagggtgacgacctacaaaggatggtgcggctcggccctggtctgtgaggccggtggcgtccgacgcatcattggcctgcattctgctggcgccgccggtatcggcgccgggacctatatctcaaaattaggactaatcaaagccctgaaacacctcggtgaacctttggccacaatgcaaggactgatgactgaattagagcctggaatcaccgtacatgtaccccggaaatccaaattgagaaagacgaccgcacacgcggtgtacaaaccggagtttgagcctgctgtgttgtcaaaatttgatcccagactgaacaaggatgttgacttggatgaagtaatttggtctaaacacactgccaatgtcccttaccaacctcctttgttctacacatacatgtcagagtacgctcatcgagtcttctccttcttggggaaagacaatgacattctgaccgtcaaagaagcaattctgggcatccccggactagaccccatggatccccacacagctccgggtctgccttacgccatcaacggccttcgacgtactgatctcgtcgattttgtgaacggtacagtagatgcggcgctggctgtacaaatccagaaattcttagacggtgactactctgaccatgtcttccaaacttttctgaaagatgagatcagaccctcagagaaagtccgagcgggaaaaacccgcattgttgatgtgccctccctggcgcattgcattgtgggcagaatgttgcttgggcgctttgctgccaagtttcaatcccatcctggctttctcctcggctctgctatcgggtctgaccctgatgttttctggaccgtcataggggctcaactcgaggggagaaagaacacgtatgacgtggactacagtgcctttgactcttcacacggcactggctccttcgaggctctcatctctcactttttcaccgtggacaatggttttagccctgcgctgggaccgtatctcagatccctggctgtctcggtgcacgcttacggcgagcgtcgcatcaagattaccggtggcctcccctccggttgtgccgcgaccagcctgctgaacacagtgctcaacaatgtgatcatcaggactgctctggcattgacttacaaggaatttgaatatgacatggttgatatcatcgcctacggtgacgaccttctggttggcacggattacgatctggacttcaatgaggtggcacgacgcgctgccaagttggggtataagatgactcctgccaacaagggttctgtcttccctccgacttcctctctttccgatgctgtttttctaaagcgcaaattcgtccaaaacaacgacggcttatacaaaccagttatggatttaaagaatttggaagccatgctctcctacttcaaaccaggaacactactcgagaagctgcaatctgtttctatgttggctcaacattctggaaaagaagaatatgatagattgatgcaccccttcgctgactacggtgccgtaccgagtcacgagtacctgcaggcaagatggagggccttgttcgactgacccagatagcccaaggcgcttcggtgctgccggcgattctgggagaactcagtcggaacagaaaagggaaaaaaaaaaaaaaaaaaaaaaaaaaaaaaggccggcatggtcccagcctcctcgctggcgccggctgggcaacatgcttcggcatggcgaatgggacgcggccgctcgagtctagagggcccgtttaaacccgctgatcagcctcgactgtgccttctagttgccagccatctgttgtttgcccctcccccgtgccttccttgaccctggaaggtgccactcccactgtcctttcctaataaaatgaggaaattgcatcgcattgtctgagtaggtgtcattctattctggggggtggggtggggcaggacagcaagggggaggattgggaagacaatagcaggcatgctggggatgcggtgggctctatggtgctggcgtttttccataggctc

SEQ ID NO: 24 - RNA, 6272 nt, Artificial Sequence
  NEP-BV-SVV-mCh Trunc2 RNA
uuugaaauggggggcugggcccugaugcccaguccuuccuuuccccuuccgggggguuaaccggcuguguuugcuagaggcacagaggggcaacauccaaccugcuuuugcggggaacggugcggcuccgauuccugcgucgccaaagguguuagcgcacccaaacggcgcaccuaccaauguuauugguguggucugcgaguucuagccuacucguuucucccccgaccauucacucacccacgaaaaguguguuguaaccauaagauuuaacccccgcacgggaugugcgauaaccguaagacuggcucaagcgcggaaagcgcuguaaccacaugcuguuagucccuuuauggcugcaagauggcuacccaccucggaucacugaacuggagcucgacccuccuuaguaagggaaccgagaggccuucgugcaacaagcuccgacacagaguccacgugacugcuaccaccaugaguacaugguucuccccucucgacccaggacuucuuuuugaauauccacggcucgauccagaggguggggcaugaccccuagcauagcgagcuacagcgggaacuguagcuaggccuuagcgugccuuggauacugccugauagggcgacggccuagucgugucgguucuauagguagcacauacaaauaugcagaacucucauuuuucuuucgauacagccucuggcaccuuugaagauguaaccggaacaaaagucaagaucguugaauaccccagaucggugaacaaugguguuuacgauucgucuacucauuuggagauacugaaccuacagggugaaauugaaauuuuaaggucuuucaaugaauaccaaauucgcgccgccaaacaacaacucggacuggacaucguguacgaacuacaggguaauguucagacaacgucaaagaaugauuuugauucccguggcaauaaugguaacaugaccuucaauuacuacgcaaacacuuaucagaauucaguagacuucucgaccuccucgucggcgucaggcgccggaccugggaacucucggggcggauuagcgggucuccucacaaauuucaguggaaucuugaacccucuuggcuaccucaaagaucacaacaccgaagaaauggaaaacucugcugaucgagucacaacgcaaacggcgggcaacacugccauaaacacgcaaucaucauuggguguguugugugccuacguugaagacccgaccaaaucugauccuccguccagcagcacagaucaacccaccaccacuuucacugccaucgacaggugguacacuggacgucucaauucuuggacaaaagcuguaaaaaccuucucuuuucaggccgucccgcuucccggugccuuucugucuaggcagggaggccucaacggaggggccuucacagcuacccuacauagacacuuuuugaugaagugcggguggcaggugcagguccaauguaauuugacacaauuccaccaaggcgcucuucuuguugccaugguuccugaaaccacccuugaugucaagcccgacgguaaggcaaagagcuuacaggagcugaaugaagaacaguggguggaaaugucugacgauuaccggaccgggaaaaacaugccuuuucagucucuuggcacauacuaucggcccccuaacuggacuuggucuggcgauaucgagaccaaucccgggccgagcaagggcgaggaggauaacauggccaucaucaaggaguucaugcgcuucaaggugcacauggagggcuccgugaacggccacgaguucgagaucgagggcgagggcgagggccgccccuacgagggcacccagaccgccaagcugaaggugaccaaggguggcccccugcccuucgccugggacauccuguccccucaguucauguacggcuccaaggccuacgugaagcaccccgccgacauccccgacuacuugaagcuguccuuccccgagggcuucaagugggagcgcgugaugaacuucgaggacggcggcguggugaccgugacccaggacuccucccugcaggacggcgaguucaucuacaaggugaagcugcgcggcaccaacuuccccuccgacggccccguaaugcagaagaagaccaugggcugggaggccuccuccgagcggauguaccccgaggacggcgcccugaagggcgagaucaagcagaggcugaagcugaaggacggcggccacuacgacgcugaggucaagaccaccuacaaggccaagaagcccgugcagcugcccggcgccuacaacgucaacaucaaguuggacaucaccucccacaacgaggacuacaccaucguggaacaguacgaacgcgccgagggccgccacuccaccggcggcauggacgagcuguacaaggagggcagaggaagucugcuaacaugcggugacgucgaggagaaucccgggccugcuucugacaacccaauuuuggaguuucuugaagcagaaaaugaucuagucacucuggccucucucuggaagauggugcacucuguucaacagaccuggagaaaguaugugaagaacgaugauuuuuggcccaauuuacucagcgagcuagugggggaaggcucugucgccuuggccgccacgcuauccaaccaagcuucaguaaaggcucuuuugggccugcacuuucucucucgggggcucaauuacacugacuuuuacucuuuacugauagagaaaugcucuaguuucuuuaccguagaaccaccuccuccaccagcugaaaaccugaugaccaagcccucagugaagucgaaauuccgaaaacuguuuaagaugcaaggacccauggacaaagucaaagacuggaaccaaauagcugccggcuugaagaauuuucaauuuguucgugaccuagucaaagagguggucgauuggcugcaggccuggaucaacaaagagaaagccagcccuguccuccaguaccaguuggagaugaagaagcucgggccuguggccuuggcucaugacgcuuucauggcugguuccgggcccccucuuagcgacgaccagauugaauaccuccagaaccucaaaucucuugcccuaacacuggggaagacuaauuuggcccaaagucucaccacuaugaucaaugccaaacaaaguucagcccaacgaguugaacccguuguggugguccuuagaggcaagccgggaugcggcaagagcuuggccucuacguugauugcccaggcuguguccaagcgccucuauggcucccaaaguguauauucucuucccccagauccagauuucuucgauggauacaaaggacaguucgugaccuugauggaugauuugggacaaaacccggauggacaagauuucuccaccuuuugucagauggugucgaccgcccaauuucuccccaacauggcggaccuugcagagaaagggcgucccuuuaccuccaaucucaucauugcaacuacaaaucucccccacuucaguccugucaccauugcugauccuucugcagucucucgccguaucaacuacgaucugacucuagaaguaucugaggccuacaagaaacacacacggcugaauuuugacuuggcuuucaggcgcacagacgccccccccauuuauccuuuugcugcccaugugcccuuuguggacguagcugugcgcuucaaaaauggucaccagaauuuuaaucuccuagaguuggucgauuccauuuguacagacauucgagccaagcaacaaggugcccgaaacaugcagacucugguucuacagagccccaacgagaaugaugacacccccgucgacgaggcguuggguagaguucucucccccgcugcggucgaugaggcgcuugucgaccucacuccagaggccgacccgguuggccguuuggcuauucuugccaagcuaggucuugcccuagcugcggucaccccuggucugauaaucuuggcagugggacucuacagguacuucucuggcucugaugcagaccaagaagaaacagaaagugagggaucugucaaggcacccaggagcgaaaaugcuuaugacggcccgaagaaaaacucuaagcccccuggagcacucucucucauggaaaugcaacagcccaacguggacaugggcuuugaggcugcggucgcuaagaaaguggucguccccauuaccuucaugguucccaacagaccuucugggcuuacacaguccgcucuucuggugaccggccggaccuuccuaaucaaugaacauacaugguccaaucccuccuggaccagcuucacaauccgcggugagguacacacucgugaugagcccuuccaaacgguucauuucacucaccacgguauucccacagaucugaugaugguacgucucggaccgggcaauucuuucccuaacaaucuagacaaguuuggacuugaccagaugccggcacgcaacucccgugugguuggcguuucguccaguuacggaaacuucuucuucucuggaaauuuccucggauuuguugauuccaucaccucugaacaaggaacuuacgcaagacucuuuagguacagggugacgaccuacaaaggauggugcggcucggcccuggucugugaggccgguggcguccgacgcaucauuggccugcauucugcuggcgccgccgguaucggcgccgggaccuauaucucaaaauuaggacuaaucaaagcccugaaacaccucggugaaccuuuggccacaaugcaaggacugaugacugaauuagagccuggaaucaccguacauguaccccggaaauccaaauugagaaagacgaccgcacacgcgguguacaaaccggaguuugagccugcuguguugucaaaauuugaucccagacugaacaaggauguugacuuggaugaaguaauuuggucuaaacacacugccaaugucccuuaccaaccuccuuuguucuacacauacaugucagaguacgcucaucgagucuucuccuucuuggggaaagacaaugacauucugaccgucaaagaagcaauucugggcauccccggacuagaccccauggauccccacacagcuccgggucugccuuacgccaucaacggccuucgacguacugaucucgucgauuuugugaacgguacaguagaugcggcgcuggcuguacaaauccagaaauucuuagacggugacuacucugaccaugucuuccaaacuuuucugaaagaugagaucagacccucagagaaaguccgagcgggaaaaacccgcauuguugaugugcccucccuggcgcauugcauugugggcagaauguugcuugggcgcuuugcugccaaguuucaaucccauccuggcuuucuccucggcucugcuaucgggucugacccugauguuuucuggaccgucauaggggcucaacucgaggggagaaagaacacguaugacguggacuacagugccuuugacucuucacacggcacuggcuccuucgaggcucucaucucucacuuuuucaccguggacaaugguuuuagcccugcgcugggaccguaucucagaucccuggcugucucggugcacgcuuacggcgagcgucgcaucaagauuaccgguggccuccccuccgguugugccgcgaccagccugcugaacacagugcucaacaaugugaucaucaggacugcucuggcauugacuuacaaggaauuugaauaugacaugguugauaucaucgccuacggugacgaccuucugguuggcacggauuacgaucuggacuucaaugagguggcacgacgcgcugccaaguugggguauaagaugacuccugccaacaaggguucugucuucccuccgacuuccucucuuuccgaugcuguuuuucuaaagcgcaaauucguccaaaacaacgacggcuuauacaaaccaguuauggauuuaaagaauuuggaagccaugcucuccuacuucaaaccaggaacacuacucgagaagcugcaaucuguuucuauguuggcucaacauucuggaaaagaagaauaugauagauugaugcaccccuucgcugacuacggugccguaccgagucacgaguaccugcaggcaagauggagggccuuguucgacugacccagauagcccaaggcgcuucggugcugccggcgauucugggagaacucagucggaacagaaaagggaaaaaaaaaaaaaaaaaaaaaaaaaaaaaa

SEQ ID NO: 25 - DNA, 7093 bp, Artificial Sequence
  NEP-BV-SVV-mCh Trunc3
cgcccccctgacgagcatcacaaaaatcgacgctcaagtcagaggtggcgaaacccgacaggactataaagataccaggcgtttccccctggaagctccctcgtgcgctctcctgttccgaccctgccgcttaccggatacctgtccgcctttctcccttcgggaagcgtggcgctttctcatagctcacgctgtaggtatctcagttcggtgtaggtcgttcgctccaagctgggctgtgtgcacgaaccccccgttcagcccgaccgctgcgccttatccggtaactatcgtcttgagtccaacccggtaagacacgacttatcgccactggcagcagccactggtaacaggattagcagagcgaggtatgtaggcggtgctacagagttcttgaagtggtggcctaactacggctacactagaagaacagtatttggtatctgcgctctgctgaagccagttaccttcggaaaaagagttggtagctcttgatccggcaaacaaaccaccgctggtagcggtggtttttttgtttgcaagcagcagattacgcgcagaaaaaaaggatctcaagaagatccttttaaaaaaattcatccaacaaacgataaaatgcaatacgttgactatctggtgctgcaataccatataaaactaaaaaacgatctgcccattcaccacctaattcttctgcaatatcacgagttgctaatgcaatatcttgataacgatctgcaacacctaaacgaccacaatcaatgaaaccactaaaacgaccattttcaaccataatatttggtaaacatgcatcaccatgagtaacaactaaatcttcaccatctggcatacttgcttttaaacgtgcaaacaattctgctggtgctaaaccttgatgttcttcatctaaatcatcttgatcaactaaacctgcttccatacgagtacgtgcacgttcaatacgatgttttgcttgatgatcaaatggacaagttgctggatctaaagtatgtaaacgacgcattgcatctgccataatactaactttttctgctggtgctaaatgactagataacaaatcttgacctggaacttcacctaacaacaaccaatcacgacctgcttcagtaacaacatctaaaactgctgcacatggaacaccagtagttgctaaccaacttaaacgtgctgcttcatcttgtaattcatttaatgcaccacttaaatcagttttaacaaacaaaactggacgaccttgtgcacttaaacgaaaaactgctgcatcagaacaaccaatagtttgttgtgcccaatcataaccaaacaaacgttcaacccatgctgctggactacctgcatgtaaaccatcttgttcaatcatactcttcctttttcaatattattgaagcatttatcagggttattgtctcatgagcggatacatatttgaagaattcacattgattattgactagttattaatagtaatcaattacggggtcattagttcatagcccatatatggagttccgcgttacataacttacggtaaatggcccgcctggctgaccgcccaacgacccccgcccattgacgtcaataatgacgtatgttcccatagtaacgccaatagggactttccattgacgtcaatgggtggagtatttacggtaaactgcccacttggcagtacatcaagtgtatcatatgccaagtacgccccctattgacgtcaatgacggtaaatggcccgcctggcattatgcccagtacatgaccttatgggactttcctacttggcagtacatctacgtattagtcatcgctattaccatggtgatgcggttttggcagtacatcaatgggcgtggatagcggtttgactcacggggatttccaagtctccaccccattgacgtcaatgggagtttgttttggcaccaaaatcaacgggactttccaaaatgtcgtaacaactccgccccattgacgcaaatgggcggtaggcgtgtacggtgggaggtctatataagcagagctctctggctaactagagaacccactgcttactggcttatcgaaattaatacgactcactatagggagacccaagctggctagcgtttaaacttaagctttctggcgatatcgagaccaatcccgggccgagcaagggcgaggaggataacatggccatcatcaaggagttcatgcgcttcaaggtgcacatggagggctccgtgaacggccacgagttcgagatcgagggcgagggcgagggccgcccctacgagggcacccagaccgccaagctgaaggtgaccaagggtggccccctgcccttcgcctgggacatcctgtcccctcagttcatgtacggctccaaggcctacgtgaagcaccccgccgacatccccgactacttgaagctgtccttccccgagggcttcaagtgggagcgcgtgatgaacttcgaggacggcggcgtggtgaccgtgacccaggactcctccctgcaggacggcgagttcatctacaaggtgaagctgcgcggcaccaacttcccctccgacggccccgtaatgcagaagaagaccatgggctgggaggcctcctccgagcggatgtaccccgaggacggcgccctgaagggcgagatcaagcagaggctgaagctgaaggacggcggccactacgacgctgaggtcaagaccacctacaaggccaagaagcccgtgcagctgcccggcgcctacaacgtcaacatcaagttggacatcacctcccacaacgaggactacaccatcgtggaacagtacgaacgcgccgagggccgccactccaccggcggcatggacgagctgtacaaggagggcagaggaagtctgctaacatgcggtgacgtcgaggagaatcccgggcctgcttctgacaacccaattttggagtttcttgaagcagaaaatgatctagtcactctggcctctctctggaagatggtgcactctgttcaacagacctggagaaagtatgtgaagaacgatgatttttggcccaatttactcagcgagctagtgggggaaggctctgtcgccttggccgccacgctatccaaccaagcttcagtaaaggctcttttgggcctgcactttctctctcgggggctcaattacactgacttttactctttactgatagagaaatgctctagtttctttaccgtagaaccacctcctccaccagctgaaaacctgatgaccaagccctcagtgaagtcgaaattccgaaaactgtttaagatgcaaggacccatggacaaagtcaaagactggaaccaaatagctgccggcttgaagaattttcaatttgttcgtgacctagtcaaagaggtggtcgattggctgcaggcctggatcaacaaagagaaagccagccctgtcctccagtaccagttggagatgaagaagctcgggcctgtggccttggctcatgacgctttcatggctggttccgggccccctcttagcgacgaccagattgaatacctccagaacctcaaatctcttgccctaacactggggaagactaatttggcccaaagtctcaccactatgatcaatgccaaacaaagttcagcccaacgagttgaacccgttgtggtggtccttagaggcaagccgggatgcggcaagagcttggcctctacgttgattgcccaggctgtgtccaagcgcctctatggctcccaaagtgtatattctcttcccccagatccagatttcttcgatggatacaaaggacagttcgtgaccttgatggatgatttgggacaaaacccggatggacaagatttctccaccttttgtcagatggtgtcgaccgcccaatttctccccaacatggcggaccttgcagagaaagggcgtccctttacctccaatctcatcattgcaactacaaatctcccccacttcagtcctgtcaccattgctgatccttctgcagtctctcgccgtatcaactacgatctgactctagaagtatctgaggcctacaagaaacacacacggctgaattttgacttggctttcaggcgcacagacgccccccccatttatccttttgctgcccatgtgccctttgtggacgtagctgtgcgcttcaaaaatggtcaccagaattttaatctcctagagttggtcgattccatttgtacagacattcgagccaagcaacaaggtgcccgaaacatgcagactctggttctacagagccccaacgagaatgatgacacccccgtcgacgaggcgttgggtagagttctctcccccgctgcggtcgatgaggcgcttgtcgacctcactccagaggccgacccggttggccgtttggctattcttgccaagctaggtcttgccctagctgcggtcacccctggtctgataatcttggcagtgggactctacaggtacttctctggctctgatgcagaccaagaagaaacagaaagtgagggatctgtcaaggcacccaggagcgaaaatgcttatgacggcccgaagaaaaactctaagccccctggagcactctctctcatggaaatgcaacagcccaacgtggacatgggctttgaggctgcggtcgctaagaaagtggtcgtccccattaccttcatggttcccaacagaccttctgggcttacacagtccgctcttctggtgaccggccggaccttcctaatcaatgaacatacatggtccaatccctcctggaccagcttcacaatccgcggtgaggtacacactcgtgatgagcccttccaaacggttcatttcactcaccacggtattcccacagatctgatgatggtacgtctcggaccgggcaattctttccctaacaatctagacaagtttggacttgaccagatgccggcacgcaactcccgtgtggttggcgtttcgtccagttacggaaacttcttcttctctggaaatttcctcggatttgttgattccatcacctctgaacaaggaacttacgcaagactctttaggtacagggtgacgacctacaaaggatggtgcggctcggccctggtctgtgaggccggtggcgtccgacgcatcattggcctgcattctgctggcgccgccggtatcggcgccgggacctatatctcaaaattaggactaatcaaagccctgaaacacctcggtgaacctttggccacaatgcaaggactgatgactgaattagagcctggaatcaccgtacatgtaccccggaaatccaaattgagaaagacgaccgcacacgcggtgtacaaaccggagtttgagcctgctgtgttgtcaaaatttgatcccagactgaacaaggatgttgacttggatgaagtaatttggtctaaacacactgccaatgtcccttaccaacctcctttgttctacacatacatgtcagagtacgctcatcgagtcttctccttcttggggaaagacaatgacattctgaccgtcaaagaagcaattctgggcatccccggactagaccccatggatccccacacagctccgggtctgccttacgccatcaacggccttcgacgtactgatctcgtcgattttgtgaacggtacagtagatgcggcgctggctgtacaaatccagaaattcttagacggtgactactctgaccatgtcttccaaacttttctgaaagatgagatcagaccctcagagaaagtccgagcgggaaaaacccgcattgttgatgtgccctccctggcgcattgcattgtgggcagaatgttgcttgggcgctttgctgccaagtttcaatcccatcctggctttctcctcggctctgctatcgggtctgaccctgatgttttctggaccgtcataggggctcaactcgaggggagaaagaacacgtatgacgtggactacagtgcctttgactcttcacacggcactggctccttcgaggctctcatctctcactttttcaccgtggacaatggttttagccctgcgctgggaccgtatctcagatccctggctgtctcggtgcacgcttacggcgagcgtcgcatcaagattaccggtggcctcccctccggttgtgccgcgaccagcctgctgaacacagtgctcaacaatgtgatcatcaggactgctctggcattgacttacaaggaatttgaatatgacatggttgatatcatcgcctacggtgacgaccttctggttggcacggattacgatctggacttcaatgaggtggcacgacgcgctgccaagttggggtataagatgactcctgccaacaagggttctgtcttccctccgacttcctctctttccgatgctgtttttctaaagcgcaaattcgtccaaaacaacgacggcttatacaaaccagttatggatttaaagaatttggaagccatgctctcctacttcaaaccaggaacactactcgagaagctgcaatctgtttctatgttggctcaacattctggaaaagaagaatatgatagattgatgcaccccttcgctgactacggtgccgtaccgagtcacgagtacctgcaggcaagatggagggccttgttcgactgacccagatagcccaaggcgcttcggtgctgccggcgattctgggagaactcagtcggaacagaaaagggaaaaaaaaaaaaaaaaaaaaaaaaaaaaaaggccggcatggtcccagcctcctcgctggcgccggctgggcaacatgcttcggcatggcgaatgggacgcggccgctcgagtctagagggcccgtttaaacccgctgatcagcctcgactgtgccttctagttgccagccatctgttgtttgcccctcccccgtgccttccttgaccctggaaggtgccactcccactgtcctttcctaataaaatgaggaaattgcatcgcattgtctgagtaggtgtcattctattctggggggtggggtggggcaggacagcaagggggaggattgggaagacaatagcaggcatgctggggatgcggtgggctctatggtgctggcgtttttccataggctc

SEQ ID NO: 26 - RNA, 4589 nt, Artificial Sequence
  NEP-BV-SVV-mCh Trunc3 RNA
ucuggcgauaucgagaccaaucccgggccgagcaagggcgaggaggauaacauggccaucaucaaggaguucaugcgcuucaaggugcacauggagggcuccgugaacggccacgaguucgagaucgagggcgagggcgagggccgccccuacgagggcacccagaccgccaagcugaaggugaccaaggguggcccccugcccuucgccugggacauccuguccccucaguucauguacggcuccaaggccuacgugaagcaccccgccgacauccccgacuacuugaagcuguccuuccccgagggcuucaagugggagcgcgugaugaacuucgaggacggcggcguggugaccgugacccaggacuccucccugcaggacggcgaguucaucuacaaggugaagcugcgcggcaccaacuuccccuccgacggccccguaaugcagaagaagaccaugggcugggaggccuccuccgagcggauguaccccgaggacggcgcccugaagggcgagaucaagcagaggcugaagcugaaggacggcggccacuacgacgcugaggucaagaccaccuacaaggccaagaagcccgugcagcugcccggcgccuacaacgucaacaucaaguuggacaucaccucccacaacgaggacuacaccaucguggaacaguacgaacgcgccgagggccgccacuccaccggcggcauggacgagcuguacaaggagggcagaggaagucugcuaacaugcggugacgucgaggagaaucccgggccugcuucugacaacccaauuuuggaguuucuugaagcagaaaaugaucuagucacucuggccucucucuggaagauggugcacucuguucaacagaccuggagaaaguaugugaagaacgaugauuuuuggcccaauuuacucagcgagcuagugggggaaggcucugucgccuuggccgccacgcuauccaaccaagcuucaguaaaggcucuuuugggccugcacuuucucucucgggggcucaauuacacugacuuuuacucuuuacugauagagaaaugcucuaguuucuuuaccguagaaccaccuccuccaccagcugaaaaccugaugaccaagcccucagugaagucgaaauuccgaaaacuguuuaagaugcaaggacccauggacaaagucaaagacuggaaccaaauagcugccggcuugaagaauuuucaauuuguucgugaccuagucaaagagguggucgauuggcugcaggccuggaucaacaaagagaaagccagcccuguccuccaguaccaguuggagaugaagaagcucgggccuguggccuuggcucaugacgcuuucauggcugguuccgggcccccucuuagcgacgaccagauugaauaccuccagaaccucaaaucucuugcccuaacacuggggaagacuaauuuggcccaaagucucaccacuaugaucaaugccaaacaaaguucagcccaacgaguugaacccguuguggugguccuuagaggcaagccgggaugcggcaagagcuuggccucuacguugauugcccaggcuguguccaagcgccucuauggcucccaaaguguauauucucuucccccagauccagauuucuucgauggauacaaaggacaguucgugaccuugauggaugauuugggacaaaacccggauggacaagauuucuccaccuuuugucagauggugucgaccgcccaauuucuccccaacauggcggaccuugcagagaaagggcgucccuuuaccuccaaucucaucauugcaacuacaaaucucccccacuucaguccugucaccauugcugauccuucugcagucucucgccguaucaacuacgaucugacucuagaaguaucugaggccuacaagaaacacacacggcugaauuuugacuuggcuuucaggcgcacagacgccccccccauuuauccuuuugcugcccaugugcccuuuguggacguagcugugcgcuucaaaaauggucaccagaauuuuaaucuccuagaguuggucgauuccauuuguacagacauucgagccaagcaacaaggugcccgaaacaugcagacucugguucuacagagccccaacgagaaugaugacacccccgucgacgaggcguuggguagaguucucucccccgcugcggucgaugaggcgcuugucgaccucacuccagaggccgacccgguuggccguuuggcuauucuugccaagcuaggucuugcccuagcugcggucaccccuggucugauaaucuuggcagugggacucuacagguacuucucuggcucugaugcagaccaagaagaaacagaaagugagggaucugucaaggcacccaggagcgaaaaugcuuaugacggcccgaagaaaaacucuaagcccccuggagcacucucucucauggaaaugcaacagcccaacguggacaugggcuuugaggcugcggucgcuaagaaaguggucguccccauuaccuucaugguucccaacagaccuucugggcuuacacaguccgcucuucuggugaccggccggaccuuccuaaucaaugaacauacaugguccaaucccuccuggaccagcuucacaauccgcggugagguacacacucgugaugagcccuuccaaacgguucauuucacucaccacgguauucccacagaucugaugaugguacgucucggaccgggcaauucuuucccuaacaaucuagacaaguuuggacuugaccagaugccggcacgcaacucccgugugguuggcguuucguccaguuacggaaacuucuucuucucuggaaauuuccucggauuuguugauuccaucaccucugaacaaggaacuuacgcaagacucuuuagguacagggugacgaccuacaaaggauggugcggcucggcccuggucugugaggccgguggcguccgacgcaucauuggccugcauucugcuggcgccgccgguaucggcgccgggaccuauaucucaaaauuaggacuaaucaaagcccugaaacaccucggugaaccuuuggccacaaugcaaggacugaugacugaauuagagccuggaaucaccguacauguaccccggaaauccaaauugagaaagacgaccgcacacgcgguguacaaaccggaguuugagccugcuguguugucaaaauuugaucccagacugaacaaggauguugacuuggaugaaguaauuuggucuaaacacacugccaaugucccuuaccaaccuccuuuguucuacacauacaugucagaguacgcucaucgagucuucuccuucuuggggaaagacaaugacauucugaccgucaaagaagcaauucugggcauccccggacuagaccccauggauccccacacagcuccgggucugccuuacgccaucaacggccuucgacguacugaucucgucgauuuugugaacgguacaguagaugcggcgcuggcuguacaaauccagaaauucuuagacggugacuacucugaccaugucuuccaaacuuuucugaaagaugagaucagacccucagagaaaguccgagcgggaaaaacccgcauuguugaugugcccucccuggcgcauugcauugugggcagaauguugcuugggcgcuuugcugccaaguuucaaucccauccuggcuuucuccucggcucugcuaucgggucugacccugauguuuucuggaccgucauaggggcucaacucgaggggagaaagaacacguaugacguggacuacagugccuuugacucuucacacggcacuggcuccuucgaggcucucaucucucacuuuuucaccguggacaaugguuuuagcccugcgcugggaccguaucucagaucccuggcugucucggugcacgcuuacggcgagcgucgcaucaagauuaccgguggccuccccuccgguugugccgcgaccagccugcugaacacagugcucaacaaugugaucaucaggacugcucuggcauugacuuacaaggaauuugaauaugacaugguugauaucaucgccuacggugacgaccuucugguuggcacggauuacgaucuggacuucaaugagguggcacgacgcgcugccaaguugggguauaagaugacuccugccaacaaggguucugucuucccuccgacuuccucucuuuccgaugcuguuuuucuaaagcgcaaauucguccaaaacaacgacggcuuauacaaaccaguuauggauuuaaagaauuuggaagccaugcucuccuacuucaaaccaggaacacuacucgagaagcugcaaucuguuucuauguuggcucaacauucuggaaaagaagaauaugauagauugaugcaccccuucgcugacuacggugccguaccgagucacgaguaccugcaggcaagauggagggccuuguucgacugacccagauagcccaaggcgcuucggugcugccggcgauucugggagaacucagucggaacagaaaagggaaaaaaaaaaaaaaaaaaaaaaaaaaaaaa

SEQ ID NO: 27 - DNA, 9067 bp, Artificial Sequence
  NEP-BV-SVV-mCh Trunc4
cgcccccctgacgagcatcacaaaaatcgacgctcaagtcagaggtggcgaaacccgacaggactataaagataccaggcgtttccccctggaagctccctcgtgcgctctcctgttccgaccctgccgcttaccggatacctgtccgcctttctcccttcgggaagcgtggcgctttctcatagctcacgctgtaggtatctcagttcggtgtaggtcgttcgctccaagctgggctgtgtgcacgaaccccccgttcagcccgaccgctgcgccttatccggtaactatcgtcttgagtccaacccggtaagacacgacttatcgccactggcagcagccactggtaacaggattagcagagcgaggtatgtaggcggtgctacagagttcttgaagtggtggcctaactacggctacactagaagaacagtatttggtatctgcgctctgctgaagccagttaccttcggaaaaagagttggtagctcttgatccggcaaacaaaccaccgctggtagcggtggtttttttgtttgcaagcagcagattacgcgcagaaaaaaaggatctcaagaagatccttttaaaaaaattcatccaacaaacgataaaatgcaatacgttgactatctggtgctgcaataccatataaaactaaaaaacgatctgcccattcaccacctaattcttctgcaatatcacgagttgctaatgcaatatcttgataacgatctgcaacacctaaacgaccacaatcaatgaaaccactaaaacgaccattttcaaccataatatttggtaaacatgcatcaccatgagtaacaactaaatcttcaccatctggcatacttgcttttaaacgtgcaaacaattctgctggtgctaaaccttgatgttcttcatctaaatcatcttgatcaactaaacctgcttccatacgagtacgtgcacgttcaatacgatgttttgcttgatgatcaaatggacaagttgctggatctaaagtatgtaaacgacgcattgcatctgccataatactaactttttctgctggtgctaaatgactagataacaaatcttgacctggaacttcacctaacaacaaccaatcacgacctgcttcagtaacaacatctaaaactgctgcacatggaacaccagtagttgctaaccaacttaaacgtgctgcttcatcttgtaattcatttaatgcaccacttaaatcagttttaacaaacaaaactggacgaccttgtgcacttaaacgaaaaactgctgcatcagaacaaccaatagtttgttgtgcccaatcataaccaaacaaacgttcaacccatgctgctggactacctgcatgtaaaccatcttgttcaatcatactcttcctttttcaatattattgaagcatttatcagggttattgtctcatgagcggatacatatttgaagaattcacattgattattgactagttattaatagtaatcaattacggggtcattagttcatagcccatatatggagttccgcgttacataacttacggtaaatggcccgcctggctgaccgcccaacgacccccgcccattgacgtcaataatgacgtatgttcccatagtaacgccaatagggactttccattgacgtcaatgggtggagtatttacggtaaactgcccacttggcagtacatcaagtgtatcatatgccaagtacgccccctattgacgtcaatgacggtaaatggcccgcctggcattatgcccagtacatgaccttatgggactttcctacttggcagtacatctacgtattagtcatcgctattaccatggtgatgcggttttggcagtacatcaatgggcgtggatagcggtttgactcacggggatttccaagtctccaccccattgacgtcaatgggagtttgttttggcaccaaaatcaacgggactttccaaaatgtcgtaacaactccgccccattgacgcaaatgggcggtaggcgtgtacggtgggaggtctatataagcagagctctctggctaactagagaacccactgcttactggcttatcgaaattaatacgactcactatagggagacccaagctggctagcgtttaaacttaagcttggtaccttatcaaactgatgagtccgtgaggacgaaacgagtaagctcgtctttgaaatggggggctgggccctgatgcccagtccttcctttccccttccggggggttaaccggctgtgtttgctagaggcacagaggggcaacatccaacctgcttttgcggggaacggtgcggctccgattcctgcgtcgccaaaggtgttagcgcacccaaacggcgcacctaccaatgttattggtgtggtctgcgagttctagcctactcgtttctcccccgaccattcactcacccacgaaaagtgtgttgtaaccataagatttaacccccgcacgggatgtgcgataaccgtaagactggctcaagcgcggaaagcgctgtaaccacatgctgttagtccctttatggctgcaagatggctacccacctcggatcactgaactggagctcgaccctccttagtaagggaaccgagaggccttcgtgcaacaagctccgacacagagtccacgtgactgctaccaccatgagtacatggttctcccctctcgacccaggacttctttttgaatatccacggctcgatccagagggtggggcatgacccctagcatagcgagctacagcgggaactgtagctaggccttagcgtgccttggatactgcctgatagggcgacggcctagtcgtgtcggttctataggtagcacatacaaatatgcagaactctcatttttctttcgatacagcctctggcacctttgaagatgtaaccggaacaaaagtcaagatcgttgaataccccagatcggtgaacaatggtgtttacgattcgtctactcatttggagatactgaacctacagggtgaaattgaaattttaaggtctttcaatgaataccaaattcgcgccgccaaacaacaactcggactggacatcgtgtacgaactacagggtaatgttcagacaacgtcaaagaatgattttgattcccgtggcaataatggtaacatgaccttcaattactacgcaaacacttatcagaattcagtagacttctcgacctcctcgtcggcgtcaggcgccggacctgggaactctcggggcggattagcgggtctcctcacaaatttcagtggaatcttgaaccctcttggctacctcaaagatcacaacaccgaagaaatggaaaactctgctgatcgagtcacaacgcaaacggcgggcaacactgccataaacacgcaatcatcattgggtgtgttgtgtgcctacgttgaagacccgaccaaatctgatcctccgtccagcagcacagatcaacccaccaccactttcactgccatcgacaggtggtacactggacgtctcaattcttggacaaaagctgtaaaaaccttctcttttcaggccgtcccgcttcccggtgcctttctgtctaggcagggaggcctcaacggaggggccttcacagctaccctacatagacactttttgatgaagtgcgggtggcaggtgcaggtccaatgtaatttgacacaattccaccaaggcgctcttcttgttgccatggttcctgaaaccacccttgatgtcaagcccgacggtaaggcaaagagcttacaggagctgaatgaagaacagtgggtggaaatgtctgacgattaccggaccgggaaaaacatgccttttcagtctcttggcacatactatcggccccctaactggacttggggtcccaatttcatcaacccctatcaagtaacggttttcccacaccaaattctgaacgcgagaacctctacctcggtagacataaacgtcccatacatcggggagacccccacgcaatcctcagagacacagaactcctggaccctcctcgttatggtgctcgttcccctagactataaggaaggagccacaactgacccagaaattacattttctgtaaggcctacaagtccctacttctctggcgatatcgagaccaatcccgggccgagcaagggcgaggaggataacatggccatcatcaaggagttcatgcgcttcaaggtgcacatggagggctccgtgaacggccacgagttcgagatcgagggcgagggcgagggccgcccctacgagggcacccagaccgccaagctgaaggtgaccaagggtggccccctgcccttcgcctgggacatcctgtcccctcagttcatgtacggctccaaggcctacgtgaagcaccccgccgacatccccgactacttgaagctgtccttccccgagggcttcaagtgggagcgcgtgatgaacttcgaggacggcggcgtggtgaccgtgacccaggactcctccctgcaggacggcgagttcatctacaaggtgaagctgcgcggcaccaacttcccctccgacggccccgtaatgcagaagaagaccatgggctgggaggcctcctccgagcggatgtaccccgaggacggcgccctgaagggcgagatcaagcagaggctgaagctgaaggacggcggccactacgacgctgaggtcaagaccacctacaaggccaagaagcccgtgcagctgcccggcgcctacaacgtcaacatcaagttggacatcacctcccacaacgaggactacaccatcgtggaacagtacgaacgcgccgagggccgccactccaccggcggcatggacgagctgtacaaggagggcagaggaagtctgctaacatgcggtgacgtcgaggagaatcccgggcctgcttctgacaacccaattttggagtttcttgaagcagaaaatgatctagtcactctggcctctctctggaagatggtgcactctgttcaacagacctggagaaagtatgtgaagaacgatgatttttggcccaatttactcagcgagctagtgggggaaggctctgtcgccttggccgccacgctatccaaccaagcttcagtaaaggctcttttgggcctgcactttctctctcgggggctcaattacactgacttttactctttactgatagagaaatgctctagtttctttaccgtagaaccacctcctccaccagctgaaaacctgatgaccaagccctcagtgaagtcgaaattccgaaaactgtttaagatgcaaggacccatggacaaagtcaaagactggaaccaaatagctgccggcttgaagaattttcaatttgttcgtgacctagtcaaagaggtggtcgattggctgcaggcctggatcaacaaagagaaagccagccctgtcctccagtaccagttggagatgaagaagctcgggcctgtggccttggctcatgacgctttcatggctggttccgggccccctcttagcgacgaccagattgaatacctccagaacctcaaatctcttgccctaacactggggaagactaatttggcccaaagtctcaccactatgatcaatgccaaacaaagttcagcccaacgagttgaacccgttgtggtggtccttagaggcaagccgggatgcggcaagagcttggcctctacgttgattgcccaggctgtgtccaagcgcctctatggctcccaaagtgtatattctcttcccccagatccagatttcttcgatggatacaaaggacagttcgtgaccttgatggatgatttgggacaaaacccggatggacaagatttctccaccttttgtcagatggtgtcgaccgcccaatttctccccaacatggcggaccttgcagagaaagggcgtccctttacctccaatctcatcattgcaactacaaatctcccccacttcagtcctgtcaccattgctgatccttctgcagtctctcgccgtatcaactacgatctgactctagaagtatctgaggcctacaagaaacacacacggctgaattttgacttggctttcaggcgcacagacgccccccccatttatccttttgctgcccatgtgccctttgtggacgtagctgtgcgcttcaaaaatggtcaccagaattttaatctcctagagttggtcgattccatttgtacagacattcgagccaagcaacaaggtgcccgaaacatgcagactctggttctacagagccccaacgagaatgatgacacccccgtcgacgaggcgttgggtagagttctctcccccgctgcggtcgatgaggcgcttgtcgacctcactccagaggccgacccggttggccgtttggctattcttgccaagctaggtcttgccctagctgcggtcacccctggtctgataatcttggcagtgggactctacaggtacttctctggctctgatgcagaccaagaagaaacagaaagtgagggatctgtcaaggcacccaggagcgaaaatgcttatgacggcccgaagaaaaactctaagccccctggagcactctctctcatggaaatgcaacagcccaacgtggacatgggctttgaggctgcggtcgctaagaaagtggtcgtccccattaccttcatggttcccaacagaccttctgggcttacacagtccgctcttctggtgaccggccggaccttcctaatcaatgaacatacatggtccaatccctcctggaccagcttcacaatccgcggtgaggtacacactcgtgatgagcccttccaaacggttcatttcactcaccacggtattcccacagatctgatgatggtacgtctcggaccgggcaattctttccctaacaatctagacaagtttggacttgaccagatgccggcacgcaactcccgtgtggttggcgtttcgtccagttacggaaacttcttcttctctggaaatttcctcggatttgttgattccatcacctctgaacaaggaacttacgcaagactctttaggtacagggtgacgacctacaaaggatggtgcggctcggccctggtctgtgaggccggtggcgtccgacgcatcattggcctgcattctgctggcgccgccggtatcggcgccgggacctatatctcaaaattaggactaatcaaagccctgaaacacctcggtgaacctttggccacaatgcaaggactgatgactgaattagagcctggaatcaccgtacatgtaccccggaaatccaaattgagaaagacgaccgcacacgcggtgtacaaaccggagtttgagcctgctgtgttgtcaaaatttgatcccagactgaacaaggatgttgacttggatgaagtaatttggtctaaacacactgccaatgtcccttaccaacctcctttgttctacacatacatgtcagagtacgctcatcgagtcttctccttcttggggaaagacaatgacattctgaccgtcaaagaagcaattctgggcatccccggactagaccccatggatccccacacagctccgggtctgccttacgccatcaacggccttcgacgtactgatctcgtcgattttgtgaacggtacagtagatgcggcgctggctgtacaaatccagaaattcttagacggtgactactctgaccatgtcttccaaacttttctgaaagatgagatcagaccctcagagaaagtccgagcgggaaaaacccgcattgttgatgtgccctccctggcgcattgcattgtgggcagaatgttgcttgggcgctttgctgccaagtttcaatcccatcctggctttctcctcggctctgctatcgggtctgaccctgatgttttctggaccgtcataggggctcaactcgaggggagaaagaacacgtatgacgtggactacagtgcctttgactcttcacacggcactggctccttcgaggctctcatctctcactttttcaccgtggacaatggttttagccctgcgctgggaccgtatctcagatccctggctgtctcggtgcacgcttacggcgagcgtcgcatcaagattaccggtggcctcccctccggttgtgccgcgaccagcctgctgaacacagtgctcaacaatgtgatcatcaggactgctctggcattgacttacaaggaatttgaatatgacatggttgatatcatcgcctacggtgacgaccttctggttggcacggattacgatctggacttcaatgaggtggcacgacgcgctgccaagttggggtataagatgactcctgccaacaagggttctgtcttccctccgacttcctctctttccgatgctgtttttctaaagcgcaaattcgtccaaaacaacgacggcttatacaaaccagttatggatttaaagaatttggaagccatgctctcctacttcaaaccaggaacactactcgagaagctgcaatctgtttctatgttggctcaacattctggaaaagaagaatatgatagattgatgcaccccttcgctgactacggtgccgtaccgagtcacgagtacctgcaggcaagatggagggccttgttcgactgacccagatagcccaaggcgcttcggtgctgccggcgattctgggagaactcagtcggaacagaaaagggaaaaaaaaaaaaaaaaaaaaaaaaaaaaaaggccggcatggtcccagcctcctcgctggcgccggctgggcaacatgcttcggcatggcgaatgggacgcggccgctcgagtctagagggcccgtttaaacccgctgatcagcctcgactgtgccttctagttgccagccatctgttgtttgcccctcccccgtgccttccttgaccctggaaggtgccactcccactgtcctttcctaataaaatgaggaaattgcatcgcattgtctgagtaggtgtcattctattctggggggtggggtggggcaggacagcaagggggaggattgggaagacaatagcaggcatgctggggatgcggtgggctctatggtgctggcgtttttccataggctc

SEQ ID NO: 28 - RNA, 6512 nt, Artificial Sequence
  NEP-BV-SVV-mCh Trunc4 RNA
uuugaaauggggggcugggcccugaugcccaguccuuccuuuccccuuccgggggguuaaccggcuguguuugcuagaggcacagaggggcaacauccaaccugcuuuugcggggaacggugcggcuccgauuccugcgucgccaaagguguuagcgcacccaaacggcgcaccuaccaauguuauugguguggucugcgaguucuagccuacucguuucucccccgaccauucacucacccacgaaaaguguguuguaaccauaagauuuaacccccgcacgggaugugcgauaaccguaagacuggcucaagcgcggaaagcgcuguaaccacaugcuguuagucccuuuauggcugcaagauggcuacccaccucggaucacugaacuggagcucgacccuccuuaguaagggaaccgagaggccuucgugcaacaagcuccgacacagaguccacgugacugcuaccaccaugaguacaugguucuccccucucgacccaggacuucuuuuugaauauccacggcucgauccagaggguggggcaugaccccuagcauagcgagcuacagcgggaacuguagcuaggccuuagcgugccuuggauacugccugauagggcgacggccuagucgugucgguucuauagguagcacauacaaauaugcagaacucucauuuuucuuucgauacagccucuggcaccuuugaagauguaaccggaacaaaagucaagaucguugaauaccccagaucggugaacaaugguguuuacgauucgucuacucauuuggagauacugaaccuacagggugaaauugaaauuuuaaggucuuucaaugaauaccaaauucgcgccgccaaacaacaacucggacuggacaucguguacgaacuacaggguaauguucagacaacgucaaagaaugauuuugauucccguggcaauaaugguaacaugaccuucaauuacuacgcaaacacuuaucagaauucaguagacuucucgaccuccucgucggcgucaggcgccggaccugggaacucucggggcggauuagcgggucuccucacaaauuucaguggaaucuugaacccucuuggcuaccucaaagaucacaacaccgaagaaauggaaaacucugcugaucgagucacaacgcaaacggcgggcaacacugccauaaacacgcaaucaucauuggguguguugugugccuacguugaagacccgaccaaaucugauccuccguccagcagcacagaucaacccaccaccacuuucacugccaucgacaggugguacacuggacgucucaauucuuggacaaaagcuguaaaaaccuucucuuuucaggccgucccgcuucccggugccuuucugucuaggcagggaggccucaacggaggggccuucacagcuacccuacauagacacuuuuugaugaagugcggguggcaggugcagguccaauguaauuugacacaauuccaccaaggcgcucuucuuguugccaugguuccugaaaccacccuugaugucaagcccgacgguaaggcaaagagcuuacaggagcugaaugaagaacaguggguggaaaugucugacgauuaccggaccgggaaaaacaugccuuuucagucucuuggcacauacuaucggcccccuaacuggacuuggggucccaauuucaucaaccccuaucaaguaacgguuuucccacaccaaauucugaacgcgagaaccucuaccucgguagacauaaacgucccauacaucggggagacccccacgcaauccucagagacacagaacuccuggacccuccucguuauggugcucguuccccuagacuauaaggaaggagccacaacugacccagaaauuacauuuucuguaaggccuacaagucccuacuucucuggcgauaucgagaccaaucccgggccgagcaagggcgaggaggauaacauggccaucaucaaggaguucaugcgcuucaaggugcacauggagggcuccgugaacggccacgaguucgagaucgagggcgagggcgagggccgccccuacgagggcacccagaccgccaagcugaaggugaccaaggguggcccccugcccuucgccugggacauccuguccccucaguucauguacggcuccaaggccuacgugaagcaccccgccgacauccccgacuacuugaagcuguccuuccccgagggcuucaagugggagcgcgugaugaacuucgaggacggcggcguggugaccgugacccaggacuccucccugcaggacggcgaguucaucuacaaggugaagcugcgcggcaccaacuuccccuccgacggccccguaaugcagaagaagaccaugggcugggaggccuccuccgagcggauguaccccgaggacggcgcccugaagggcgagaucaagcagaggcugaagcugaaggacggcggccacuacgacgcugaggucaagaccaccuacaaggccaagaagcccgugcagcugcccggcgccuacaacgucaacaucaaguuggacaucaccucccacaacgaggacuacaccaucguggaacaguacgaacgcgccgagggccgccacuccaccggcggcauggacgagcuguacaaggagggcagaggaagucugcuaacaugcggugacgucgaggagaaucccgggccugcuucugacaacccaauuuuggaguuucuugaagcagaaaaugaucuagucacucuggccucucucuggaagauggugcacucuguucaacagaccuggagaaaguaugugaagaacgaugauuuuuggcccaauuuacucagcgagcuagugggggaaggcucugucgccuuggccgccacgcuauccaaccaagcuucaguaaaggcucuuuugggccugcacuuucucucucgggggcucaauuacacugacuuuuacucuuuacugauagagaaaugcucuaguuucuuuaccguagaaccaccuccuccaccagcugaaaaccugaugaccaagcccucagugaagucgaaauuccgaaaacuguuuaagaugcaaggacccauggacaaagucaaagacuggaaccaaauagcugccggcuugaagaauuuucaauuuguucgugaccuagucaaagagguggucgauuggcugcaggccuggaucaacaaagagaaagccagcccuguccuccaguaccaguuggagaugaagaagcucgggccuguggccuuggcucaugacgcuuucauggcugguuccgggcccccucuuagcgacgaccagauugaauaccuccagaaccucaaaucucuugcccuaacacuggggaagacuaauuuggcccaaagucucaccacuaugaucaaugccaaacaaaguucagcccaacgaguugaacccguuguggugguccuuagaggcaagccgggaugcggcaagagcuuggccucuacguugauugcccaggcuguguccaagcgccucuauggcucccaaaguguauauucucuucccccagauccagauuucuucgauggauacaaaggacaguucgugaccuugauggaugauuugggacaaaacccggauggacaagauuucuccaccuuuugucagauggugucgaccgcccaauuucuccccaacauggcggaccuugcagagaaagggcgucccuuuaccuccaaucucaucauugcaacuacaaaucucccccacuucaguccugucaccauugcugauccuucugcagucucucgccguaucaacuacgaucugacucuagaaguaucugaggccuacaagaaacacacacggcugaauuuugacuuggcuuucaggcgcacagacgccccccccauuuauccuuuugcugcccaugugcccuuuguggacguagcugugcgcuucaaaaauggucaccagaauuuuaaucuccuagaguuggucgauuccauuuguacagacauucgagccaagcaacaaggugcccgaaacaugcagacucugguucuacagagccccaacgagaaugaugacacccccgucgacgaggcguuggguagaguucucucccccgcugcggucgaugaggcgcuugucgaccucacuccagaggccgacccgguuggccguuuggcuauucuugccaagcuaggucuugcccuagcugcggucaccccuggucugauaaucuuggcagugggacucuacagguacuucucuggcucugaugcagaccaagaagaaacagaaagugagggaucugucaaggcacccaggagcgaaaaugcuuaugacggcccgaagaaaaacucuaagcccccuggagcacucucucucauggaaaugcaacagcccaacguggacaugggcuuugaggcugcggucgcuaagaaaguggucguccccauuaccuucaugguucccaacagaccuucugggcuuacacaguccgcucuucuggugaccggccggaccuuccuaaucaaugaacauacaugguccaaucccuccuggaccagcuucacaauccgcggugagguacacacucgugaugagcccuuccaaacgguucauuucacucaccacgguauucccacagaucugaugaugguacgucucggaccgggcaauucuuucccuaacaaucuagacaaguuuggacuugaccagaugccggcacgcaacucccgugugguuggcguuucguccaguuacggaaacuucuucuucucuggaaauuuccucggauuuguugauuccaucaccucugaacaaggaacuuacgcaagacucuuuagguacagggugacgaccuacaaaggauggugcggcucggcccuggucugugaggccgguggcguccgacgcaucauuggccugcauucugcuggcgccgccgguaucggcgccgggaccuauaucucaaaauuaggacuaaucaaagcccugaaacaccucggugaaccuuuggccacaaugcaaggacugaugacugaauuagagccuggaaucaccguacauguaccccggaaauccaaauugagaaagacgaccgcacacgcgguguacaaaccggaguuugagccugcuguguugucaaaauuugaucccagacugaacaaggauguugacuuggaugaaguaauuuggucuaaacacacugccaaugucccuuaccaaccuccuuuguucuacacauacaugucagaguacgcucaucgagucuucuccuucuuggggaaagacaaugacauucugaccgucaaagaagcaauucugggcauccccggacuagaccccauggauccccacacagcuccgggucugccuuacgccaucaacggccuucgacguacugaucucgucgauuuugugaacgguacaguagaugcggcgcuggcuguacaaauccagaaauucuuagacggugacuacucugaccaugucuuccaaacuuuucugaaagaugagaucagacccucagagaaaguccgagcgggaaaaacccgcauuguugaugugcccucccuggcgcauugcauugugggcagaauguugcuugggcgcuuugcugccaaguuucaaucccauccuggcuuucuccucggcucugcuaucgggucugacccugauguuuucuggaccgucauaggggcucaacucgaggggagaaagaacacguaugacguggacuacagugccuuugacucuucacacggcacuggcuccuucgaggcucucaucucucacuuuuucaccguggacaaugguuuuagcccugcgcugggaccguaucucagaucccuggcugucucggugcacgcuuacggcgagcgucgcaucaagauuaccgguggccuccccuccgguugugccgcgaccagccugcugaacacagugcucaacaaugugaucaucaggacugcucuggcauugacuuacaaggaauuugaauaugacaugguugauaucaucgccuacggugacgaccuucugguuggcacggauuacgaucuggacuucaaugagguggcacgacgcgcugccaaguugggguauaagaugacuccugccaacaaggguucugucuucccuccgacuuccucucuuuccgaugcuguuuuucuaaagcgcaaauucguccaaaacaacgacggcuuauacaaaccaguuauggauuuaaagaauuuggaagccaugcucuccuacuucaaaccaggaacacuacucgagaagcugcaaucuguuucuauguuggcucaacauucuggaaaagaagaauaugauagauugaugcaccccuucgcugacuacggugccguaccgagucacgaguaccugcaggcaagauggagggccuuguucgacugacccagauagcccaaggcgcuucggugcugccggcgauucugggagaacucagucggaacagaaaagggaaaaaaaaaaaaaaaaaaaaaaaaaaaaaa

SEQ ID NO: 29 - DNA, 8743 bp, Artificial Sequence
  NEP-BV-SVV-mCh Trunc5
cgcccccctgacgagcatcacaaaaatcgacgctcaagtcagaggtggcgaaacccgacaggactataaagataccaggcgtttccccctggaagctccctcgtgcgctctcctgttccgaccctgccgcttaccggatacctgtccgcctttctcccttcgggaagcgtggcgctttctcatagctcacgctgtaggtatctcagttcggtgtaggtcgttcgctccaagctgggctgtgtgcacgaaccccccgttcagcccgaccgctgcgccttatccggtaactatcgtcttgagtccaacccggtaagacacgacttatcgccactggcagcagccactggtaacaggattagcagagcgaggtatgtaggcggtgctacagagttcttgaagtggtggcctaactacggctacactagaagaacagtatttggtatctgcgctctgctgaagccagttaccttcggaaaaagagttggtagctcttgatccggcaaacaaaccaccgctggtagcggtggtttttttgtttgcaagcagcagattacgcgcagaaaaaaaggatctcaagaagatccttttaaaaaaattcatccaacaaacgataaaatgcaatacgttgactatctggtgctgcaataccatataaaactaaaaaacgatctgcccattcaccacctaattcttctgcaatatcacgagttgctaatgcaatatcttgataacgatctgcaacacctaaacgaccacaatcaatgaaaccactaaaacgaccattttcaaccataatatttggtaaacatgcatcaccatgagtaacaactaaatcttcaccatctggcatacttgcttttaaacgtgcaaacaattctgctggtgctaaaccttgatgttcttcatctaaatcatcttgatcaactaaacctgcttccatacgagtacgtgcacgttcaatacgatgttttgcttgatgatcaaatggacaagttgctggatctaaagtatgtaaacgacgcattgcatctgccataatactaactttttctgctggtgctaaatgactagataacaaatcttgacctggaacttcacctaacaacaaccaatcacgacctgcttcagtaacaacatctaaaactgctgcacatggaacaccagtagttgctaaccaacttaaacgtgctgcttcatcttgtaattcatttaatgcaccacttaaatcagttttaacaaacaaaactggacgaccttgtgcacttaaacgaaaaactgctgcatcagaacaaccaatagtttgttgtgcccaatcataaccaaacaaacgttcaacccatgctgctggactacctgcatgtaaaccatcttgttcaatcatactcttcctttttcaatattattgaagcatttatcagggttattgtctcatgagcggatacatatttgaagaattcacattgattattgactagttattaatagtaatcaattacggggtcattagttcatagcccatatatggagttccgcgttacataacttacggtaaatggcccgcctggctgaccgcccaacgacccccgcccattgacgtcaataatgacgtatgttcccatagtaacgccaatagggactttccattgacgtcaatgggtggagtatttacggtaaactgcccacttggcagtacatcaagtgtatcatatgccaagtacgccccctattgacgtcaatgacggtaaatggcccgcctggcattatgcccagtacatgaccttatgggactttcctacttggcagtacatctacgtattagtcatcgctattaccatggtgatgcggttttggcagtacatcaatgggcgtggatagcggtttgactcacggggatttccaagtctccaccccattgacgtcaatgggagtttgttttggcaccaaaatcaacgggactttccaaaatgtcgtaacaactccgccccattgacgcaaatgggcggtaggcgtgtacggtgggaggtctatataagcagagctctctggctaactagagaacccactgcttactggcttatcgaaattaatacgactcactatagggagacccaagctggctagcgtttaaacttaagcttggtaccttatcaaactgatgagtccgtgaggacgaaacgagtaagctcgtctttgaaatggggggctgggccctgatgcccagtccttcctttccccttccggggggttaaccggctgtgtttgctagaggcacagaggggcaacatccaacctgcttttgcggggaacggtgcggctccgattcctgcgtcgccaaaggtgttagcgcacccaaacggcgcacctaccaatgttattggtgtggtctgcgagttctagcctactcgtttctcccccgaccattcactcacccacgaaaagtgtgttgtaaccataagatttaacccccgcacgggatgtgcgataaccgtaagactggctcaagcgcggaaagcgctgtaaccacatgctgttagtccctttatggctgcaagatggctacccacctcggatcactgaactggagctcgaccctccttagtaagggaaccgagaggccttcgtgcaacaagctccgacacagagtccacgtgactgctaccaccatgagtacatggttctcccctctcgacccaggacttctttttgaatatccacggctcgatccagagggtggggcatgacccctagcatagcgagctacagcgggaactgtagctaggccttagcgtgccttggatactgcctgatagggcgacggcctagtcgtgtcggttctataggtagcacatacaaatatgcagaactctcatttttctttcgatacagcctctggcacctttgaagatgtaaccggaacaaaagtcaagatcgttgaataccccagatcggtgaacaatggtgtttacgattcgtctactcatttggagatactgaacctacagggtgaaattgaaattttaaggtctttcaatgaataccaaattcgcgccgccaaacaacaactcggactggacatcgtgtacgaactacagggtaatgttcagacaacgtcaaagaatgattttgattcccgtggcaataatggtaacatgaccttcaattactacgcaaacacttatcagaattcagtagacttctcgacctcctcgtcggcgtcaggcgccggacctgggaactctcggggcggattagcgggtctcctcacaaatttcagtggaatcttgaaccctcttggctacctcaaagatcacaacaccgaagaaatggaaaactctgctgatcgagtcacaacgcaaacggcgggcaacactgccataaacacgcaatcatcattgggtgtgttgtgtgcctacgttgaagacccgaccaaatctgatcctccgtccagcagcacagatcaacccaccaccactttcactgccatcgacaggtggtacactggacgtctcaattcttggacaaaagctgtaaaaaccttctcttttcaggccgtcccgcttcccggtgcctttctgtctaggcagggaggcctcaacggaggggccttcacagctaccctacatagacactttttgatgaagtgcgggtggcaggtgcaggtccaatgtaatttgacacaattccaccaaggcgctcttcttgttgccatggttcctgaaaccacccttgatgtcaagcccgacggtaaggcaaagagcttacaggagctgaatgaagaacagtgggtgtctggcgatatcgagaccaatcccgggccgagcaagggcgaggaggataacatggccatcatcaaggagttcatgcgcttcaaggtgcacatggagggctccgtgaacggccacgagttcgagatcgagggcgagggcgagggccgcccctacgagggcacccagaccgccaagctgaaggtgaccaagggtggccccctgcccttcgcctgggacatcctgtcccctcagttcatgtacggctccaaggcctacgtgaagcaccccgccgacatccccgactacttgaagctgtccttccccgagggcttcaagtgggagcgcgtgatgaacttcgaggacggcggcgtggtgaccgtgacccaggactcctccctgcaggacggcgagttcatctacaaggtgaagctgcgcggcaccaacttcccctccgacggccccgtaatgcagaagaagaccatgggctgggaggcctcctccgagcggatgtaccccgaggacggcgccctgaagggcgagatcaagcagaggctgaagctgaaggacggcggccactacgacgctgaggtcaagaccacctacaaggccaagaagcccgtgcagctgcccggcgcctacaacgtcaacatcaagttggacatcacctcccacaacgaggactacaccatcgtggaacagtacgaacgcgccgagggccgccactccaccggcggcatggacgagctgtacaaggagggcagaggaagtctgctaacatgcggtgacgtcgaggagaatcccgggcctgcttctgacaacccaattttggagtttcttgaagcagaaaatgatctagtcactctggcctctctctggaagatggtgcactctgttcaacagacctggagaaagtatgtgaagaacgatgatttttggcccaatttactcagcgagctagtgggggaaggctctgtcgccttggccgccacgctatccaaccaagcttcagtaaaggctcttttgggcctgcactttctctctcgggggctcaattacactgacttttactctttactgatagagaaatgctctagtttctttaccgtagaaccacctcctccaccagctgaaaacctgatgaccaagccctcagtgaagtcgaaattccgaaaactgtttaagatgcaaggacccatggacaaagtcaaagactggaaccaaatagctgccggcttgaagaattttcaatttgttcgtgacctagtcaaagaggtggtcgattggctgcaggcctggatcaacaaagagaaagccagccctgtcctccagtaccagttggagatgaagaagctcgggcctgtggccttggctcatgacgctttcatggctggttccgggccccctcttagcgacgaccagattgaatacctccagaacctcaaatctcttgccctaacactggggaagactaatttggcccaaagtctcaccactatgatcaatgccaaacaaagttcagcccaacgagttgaacccgttgtggtggtccttagaggcaagccgggatgcggcaagagcttggcctctacgttgattgcccaggctgtgtccaagcgcctctatggctcccaaagtgtatattctcttcccccagatccagatttcttcgatggatacaaaggacagttcgtgaccttgatggatgatttgggacaaaacccggatggacaagatttctccaccttttgtcagatggtgtcgaccgcccaatttctccccaacatggcggaccttgcagagaaagggcgtccctttacctccaatctcatcattgcaactacaaatctcccccacttcagtcctgtcaccattgctgatccttctgcagtctctcgccgtatcaactacgatctgactctagaagtatctgaggcctacaagaaacacacacggctgaattttgacttggctttcaggcgcacagacgccccccccatttatccttttgctgcccatgtgccctttgtggacgtagctgtgcgcttcaaaaatggtcaccagaattttaatctcctagagttggtcgattccatttgtacagacattcgagccaagcaacaaggtgcccgaaacatgcagactctggttctacagagccccaacgagaatgatgacacccccgtcgacgaggcgttgggtagagttctctcccccgctgcggtcgatgaggcgcttgtcgacctcactccagaggccgacccggttggccgtttggctattcttgccaagctaggtcttgccctagctgcggtcacccctggtctgataatcttggcagtgggactctacaggtacttctctggctctgatgcagaccaagaagaaacagaaagtgagggatctgtcaaggcacccaggagcgaaaatgcttatgacggcccgaagaaaaactctaagccccctggagcactctctctcatggaaatgcaacagcccaacgtggacatgggctttgaggctgcggtcgctaagaaagtggtcgtccccattaccttcatggttcccaacagaccttctgggcttacacagtccgctcttctggtgaccggccggaccttcctaatcaatgaacatacatggtccaatccctcctggaccagcttcacaatccgcggtgaggtacacactcgtgatgagcccttccaaacggttcatttcactcaccacggtattcccacagatctgatgatggtacgtctcggaccgggcaattctttccctaacaatctagacaagtttggacttgaccagatgccggcacgcaactcccgtgtggttggcgtttcgtccagttacggaaacttcttcttctctggaaatttcctcggatttgttgattccatcacctctgaacaaggaacttacgcaagactctttaggtacagggtgacgacctacaaaggatggtgcggctcggccctggtctgtgaggccggtggcgtccgacgcatcattggcctgcattctgctggcgccgccggtatcggcgccgggacctatatctcaaaattaggactaatcaaagccctgaaacacctcggtgaacctttggccacaatgcaaggactgatgactgaattagagcctggaatcaccgtacatgtaccccggaaatccaaattgagaaagacgaccgcacacgcggtgtacaaaccggagtttgagcctgctgtgttgtcaaaatttgatcccagactgaacaaggatgttgacttggatgaagtaatttggtctaaacacactgccaatgtcccttaccaacctcctttgttctacacatacatgtcagagtacgctcatcgagtcttctccttcttggggaaagacaatgacattctgaccgtcaaagaagcaattctgggcatccccggactagaccccatggatccccacacagctccgggtctgccttacgccatcaacggccttcgacgtactgatctcgtcgattttgtgaacggtacagtagatgcggcgctggctgtacaaatccagaaattcttagacggtgactactctgaccatgtcttccaaacttttctgaaagatgagatcagaccctcagagaaagtccgagcgggaaaaacccgcattgttgatgtgccctccctggcgcattgcattgtgggcagaatgttgcttgggcgctttgctgccaagtttcaatcccatcctggctttctcctcggctctgctatcgggtctgaccctgatgttttctggaccgtcataggggctcaactcgaggggagaaagaacacgtatgacgtggactacagtgcctttgactcttcacacggcactggctccttcgaggctctcatctctcactttttcaccgtggacaatggttttagccctgcgctgggaccgtatctcagatccctggctgtctcggtgcacgcttacggcgagcgtcgcatcaagattaccggtggcctcccctccggttgtgccgcgaccagcctgctgaacacagtgctcaacaatgtgatcatcaggactgctctggcattgacttacaaggaatttgaatatgacatggttgatatcatcgcctacggtgacgaccttctggttggcacggattacgatctggacttcaatgaggtggcacgacgcgctgccaagttggggtataagatgactcctgccaacaagggttctgtcttccctccgacttcctctctttccgatgctgtttttctaaagcgcaaattcgtccaaaacaacgacggcttatacaaaccagttatggatttaaagaatttggaagccatgctctcctacttcaaaccaggaacactactcgagaagctgcaatctgtttctatgttggctcaacattctggaaaagaagaatatgatagattgatgcaccccttcgctgactacggtgccgtaccgagtcacgagtacctgcaggcaagatggagggccttgttcgactgacccagatagcccaaggcgcttcggtgctgccggcgattctgggagaactcagtcggaacagaaaagggaaaaaaaaaaaaaaaaaaaaaaaaaaaaaaggccggcatggtcccagcctcctcgctggcgccggctgggcaacatgcttcggcatggcgaatgggacgcggccgctcgagtctagagggcccgtttaaacccgctgatcagcctcgactgtgccttctagttgccagccatctgttgtttgcccctcccccgtgccttccttgaccctggaaggtgccactcccactgtcctttcctaataaaatgaggaaattgcatcgcattgtctgagtaggtgtcattctattctggggggtggggtggggcaggacagcaagggggaggattgggaagacaatagcaggcatgctggggatgcggtgggctctatggtgctggcgtttttccataggctc

SEQ ID NO: 30 - RNA, 6188 nt, Artificial Sequence
  NEP-BV-SVV-mCh Trunc5 RNA
uuugaaauggggggcugggcccugaugcccaguccuuccuuuccccuuccgggggguuaaccggcuguguuugcuagaggcacagaggggcaacauccaaccugcuuuugcggggaacggugcggcuccgauuccugcgucgccaaagguguuagcgcacccaaacggcgcaccuaccaauguuauugguguggucugcgaguucuagccuacucguuucucccccgaccauucacucacccacgaaaaguguguuguaaccauaagauuuaacccccgcacgggaugugcgauaaccguaagacuggcucaagcgcggaaagcgcuguaaccacaugcuguuagucccuuuauggcugcaagauggcuacccaccucggaucacugaacuggagcucgacccuccuuaguaagggaaccgagaggccuucgugcaacaagcuccgacacagaguccacgugacugcuaccaccaugaguacaugguucuccccucucgacccaggacuucuuuuugaauauccacggcucgauccagaggguggggcaugaccccuagcauagcgagcuacagcgggaacuguagcuaggccuuagcgugccuuggauacugccugauagggcgacggccuagucgugucgguucuauagguagcacauacaaauaugcagaacucucauuuuucuuucgauacagccucuggcaccuuugaagauguaaccggaacaaaagucaagaucguugaauaccccagaucggugaacaaugguguuuacgauucgucuacucauuuggagauacugaaccuacagggugaaauugaaauuuuaaggucuuucaaugaauaccaaauucgcgccgccaaacaacaacucggacuggacaucguguacgaacuacaggguaauguucagacaacgucaaagaaugauuuugauucccguggcaauaaugguaacaugaccuucaauuacuacgcaaacacuuaucagaauucaguagacuucucgaccuccucgucggcgucaggcgccggaccugggaacucucggggcggauuagcgggucuccucacaaauuucaguggaaucuugaacccucuuggcuaccucaaagaucacaacaccgaagaaauggaaaacucugcugaucgagucacaacgcaaacggcgggcaacacugccauaaacacgcaaucaucauuggguguguugugugccuacguugaagacccgaccaaaucugauccuccguccagcagcacagaucaacccaccaccacuuucacugccaucgacaggugguacacuggacgucucaauucuuggacaaaagcuguaaaaaccuucucuuuucaggccgucccgcuucccggugccuuucugucuaggcagggaggccucaacggaggggccuucacagcuacccuacauagacacuuuuugaugaagugcggguggcaggugcagguccaauguaauuugacacaauuccaccaaggcgcucuucuuguugccaugguuccugaaaccacccuugaugucaagcccgacgguaaggcaaagagcuuacaggagcugaaugaagaacagugggugucuggcgauaucgagaccaaucccgggccgagcaagggcgaggaggauaacauggccaucaucaaggaguucaugcgcuucaaggugcacauggagggcuccgugaacggccacgaguucgagaucgagggcgagggcgagggccgccccuacgagggcacccagaccgccaagcugaaggugaccaaggguggcccccugcccuucgccugggacauccuguccccucaguucauguacggcuccaaggccuacgugaagcaccccgccgacauccccgacuacuugaagcuguccuuccccgagggcuucaagugggagcgcgugaugaacuucgaggacggcggcguggugaccgugacccaggacuccucccugcaggacggcgaguucaucuacaaggugaagcugcgcggcaccaacuuccccuccgacggccccguaaugcagaagaagaccaugggcugggaggccuccuccgagcggauguaccccgaggacggcgcccugaagggcgagaucaagcagaggcugaagcugaaggacggcggccacuacgacgcugaggucaagaccaccuacaaggccaagaagcccgugcagcugcccggcgccuacaacgucaacaucaaguuggacaucaccucccacaacgaggacuacaccaucguggaacaguacgaacgcgccgagggccgccacuccaccggcggcauggacgagcuguacaaggagggcagaggaagucugcuaacaugcggugacgucgaggagaaucccgggccugcuucugacaacccaauuuuggaguuucuugaagcagaaaaugaucuagucacucuggccucucucuggaagauggugcacucuguucaacagaccuggagaaaguaugugaagaacgaugauuuuuggcccaauuuacucagcgagcuagugggggaaggcucugucgccuuggccgccacgcuauccaaccaagcuucaguaaaggcucuuuugggccugcacuuucucucucgggggcucaauuacacugacuuuuacucuuuacugauagagaaaugcucuaguuucuuuaccguagaaccaccuccuccaccagcugaaaaccugaugaccaagcccucagugaagucgaaauuccgaaaacuguuuaagaugcaaggacccauggacaaagucaaagacuggaaccaaauagcugccggcuugaagaauuuucaauuuguucgugaccuagucaaagagguggucgauuggcugcaggccuggaucaacaaagagaaagccagcccuguccuccaguaccaguuggagaugaagaagcucgggccuguggccuuggcucaugacgcuuucauggcugguuccgggcccccucuuagcgacgaccagauugaauaccuccagaaccucaaaucucuugcccuaacacuggggaagacuaauuuggcccaaagucucaccacuaugaucaaugccaaacaaaguucagcccaacgaguugaacccguuguggugguccuuagaggcaagccgggaugcggcaagagcuuggccucuacguugauugcccaggcuguguccaagcgccucuauggcucccaaaguguauauucucuucccccagauccagauuucuucgauggauacaaaggacaguucgugaccuugauggaugauuugggacaaaacccggauggacaagauuucuccaccuuuugucagauggugucgaccgcccaauuucuccccaacauggcggaccuugcagagaaagggcgucccuuuaccuccaaucucaucauugcaacuacaaaucucccccacuucaguccugucaccauugcugauccuucugcagucucucgccguaucaacuacgaucugacucuagaaguaucugaggccuacaagaaacacacacggcugaauuuugacuuggcuuucaggcgcacagacgccccccccauuuauccuuuugcugcccaugugcccuuuguggacguagcugugcgcuucaaaaauggucaccagaauuuuaaucuccuagaguuggucgauuccauuuguacagacauucgagccaagcaacaaggugcccgaaacaugcagacucugguucuacagagccccaacgagaaugaugacacccccgucgacgaggcguuggguagaguucucucccccgcugcggucgaugaggcgcuugucgaccucacuccagaggccgacccgguuggccguuuggcuauucuugccaagcuaggucuugcccuagcugcggucaccccuggucugauaaucuuggcagugggacucuacagguacuucucuggcucugaugcagaccaagaagaaacagaaagugagggaucugucaaggcacccaggagcgaaaaugcuuaugacggcccgaagaaaaacucuaagcccccuggagcacucucucucauggaaaugcaacagcccaacguggacaugggcuuugaggcugcggucgcuaagaaaguggucguccccauuaccuucaugguucccaacagaccuucugggcuuacacaguccgcucuucuggugaccggccggaccuuccuaaucaaugaacauacaugguccaaucccuccuggaccagcuucacaauccgcggugagguacacacucgugaugagcccuuccaaacgguucauuucacucaccacgguauucccacagaucugaugaugguacgucucggaccgggcaauucuuucccuaacaaucuagacaaguuuggacuugaccagaugccggcacgcaacucccgugugguuggcguuucguccaguuacggaaacuucuucuucucuggaaauuuccucggauuuguugauuccaucaccucugaacaaggaacuuacgcaagacucuuuagguacagggugacgaccuacaaaggauggugcggcucggcccuggucugugaggccgguggcguccgacgcaucauuggccugcauucugcuggcgccgccgguaucggcgccgggaccuauaucucaaaauuaggacuaaucaaagcccugaaacaccucggugaaccuuuggccacaaugcaaggacugaugacugaauuagagccuggaaucaccguacauguaccccggaaauccaaauugagaaagacgaccgcacacgcgguguacaaaccggaguuugagccugcuguguugucaaaauuugaucccagacugaacaaggauguugacuuggaugaaguaauuuggucuaaacacacugccaaugucccuuaccaaccuccuuuguucuacacauacaugucagaguacgcucaucgagucuucuccuucuuggggaaagacaaugacauucugaccgucaaagaagcaauucugggcauccccggacuagaccccauggauccccacacagcuccgggucugccuuacgccaucaacggccuucgacguacugaucucgucgauuuugugaacgguacaguagaugcggcgcuggcuguacaaauccagaaauucuuagacggugacuacucugaccaugucuuccaaacuuuucugaaagaugagaucagacccucagagaaaguccgagcgggaaaaacccgcauuguugaugugcccucccuggcgcauugcauugugggcagaauguugcuugggcgcuuugcugccaaguuucaaucccauccuggcuuucuccucggcucugcuaucgggucugacccugauguuuucuggaccgucauaggggcucaacucgaggggagaaagaacacguaugacguggacuacagugccuuugacucuucacacggcacuggcuccuucgaggcucucaucucucacuuuuucaccguggacaaugguuuuagcccugcgcugggaccguaucucagaucccuggcugucucggugcacgcuuacggcgagcgucgcaucaagauuaccgguggccuccccuccgguugugccgcgaccagccugcugaacacagugcucaacaaugugaucaucaggacugcucuggcauugacuuacaaggaauuugaauaugacaugguugauaucaucgccuacggugacgaccuucugguuggcacggauuacgaucuggacuucaaugagguggcacgacgcgcugccaaguugggguauaagaugacuccugccaacaaggguucugucuucccuccgacuuccucucuuuccgaugcuguuuuucuaaagcgcaaauucguccaaaacaacgacggcuuauacaaaccaguuauggauuuaaagaauuuggaagccaugcucuccuacuucaaaccaggaacacuacucgagaagcugcaaucuguuucuauguuggcucaacauucuggaaaagaagaauaugauagauugaugcaccccuucgcugacuacggugccguaccgagucacgaguaccugcaggcaagauggagggccuuguucgacugacccagauagcccaaggcgcuucggugcugccggcgauucugggagaacucagucggaacagaaaagggaaaaaaaaaaaaaaaaaaaaaaaaaaaaaa

SEQ ID NO: 31 - DNA, 8260 bp, Artificial Sequence
  NEP-BV-SVV-mCh Trunc6
cgcccccctgacgagcatcacaaaaatcgacgctcaagtcagaggtggcgaaacccgacaggactataaagataccaggcgtttccccctggaagctccctcgtgcgctctcctgttccgaccctgccgcttaccggatacctgtccgcctttctcccttcgggaagcgtggcgctttctcatagctcacgctgtaggtatctcagttcggtgtaggtcgttcgctccaagctgggctgtgtgcacgaaccccccgttcagcccgaccgctgcgccttatccggtaactatcgtcttgagtccaacccggtaagacacgacttatcgccactggcagcagccactggtaacaggattagcagagcgaggtatgtaggcggtgctacagagttcttgaagtggtggcctaactacggctacactagaagaacagtatttggtatctgcgctctgctgaagccagttaccttcggaaaaagagttggtagctcttgatccggcaaacaaaccaccgctggtagcggtggtttttttgtttgcaagcagcagattacgcgcagaaaaaaaggatctcaagaagatccttttaaaaaaattcatccaacaaacgataaaatgcaatacgttgactatctggtgctgcaataccatataaaactaaaaaacgatctgcccattcaccacctaattcttctgcaatatcacgagttgctaatgcaatatcttgataacgatctgcaacacctaaacgaccacaatcaatgaaaccactaaaacgaccattttcaaccataatatttggtaaacatgcatcaccatgagtaacaactaaatcttcaccatctggcatacttgcttttaaacgtgcaaacaattctgctggtgctaaaccttgatgttcttcatctaaatcatcttgatcaactaaacctgcttccatacgagtacgtgcacgttcaatacgatgttttgcttgatgatcaaatggacaagttgctggatctaaagtatgtaaacgacgcattgcatctgccataatactaactttttctgctggtgctaaatgactagataacaaatcttgacctggaacttcacctaacaacaaccaatcacgacctgcttcagtaacaacatctaaaactgctgcacatggaacaccagtagttgctaaccaacttaaacgtgctgcttcatcttgtaattcatttaatgcaccacttaaatcagttttaacaaacaaaactggacgaccttgtgcacttaaacgaaaaactgctgcatcagaacaaccaatagtttgttgtgcccaatcataaccaaacaaacgttcaacccatgctgctggactacctgcatgtaaaccatcttgttcaatcatactcttcctttttcaatattattgaagcatttatcagggttattgtctcatgagcggatacatatttgaagaattcacattgattattgactagttattaatagtaatcaattacggggtcattagttcatagcccatatatggagttccgcgttacataacttacggtaaatggcccgcctggctgaccgcccaacgacccccgcccattgacgtcaataatgacgtatgttcccatagtaacgccaatagggactttccattgacgtcaatgggtggagtatttacggtaaactgcccacttggcagtacatcaagtgtatcatatgccaagtacgccccctattgacgtcaatgacggtaaatggcccgcctggcattatgcccagtacatgaccttatgggactttcctacttggcagtacatctacgtattagtcatcgctattaccatggtgatgcggttttggcagtacatcaatgggcgtggatagcggtttgactcacggggatttccaagtctccaccccattgacgtcaatgggagtttgttttggcaccaaaatcaacgggactttccaaaatgtcgtaacaactccgccccattgacgcaaatgggcggtaggcgtgtacggtgggaggtctatataagcagagctctctggctaactagagaacccactgcttactggcttatcgaaattaatacgactcactatagggagacccaagctggctagcgtttaaacttaagcttggtaccttatcaaactgatgagtccgtgaggacgaaacgagtaagctcgtctttgaaatggggggctgggccctgatgcccagtccttcctttccccttccggggggttaaccggctgtgtttgctagaggcacagaggggcaacatccaacctgcttttgcggggaacggtgcggctccgattcctgcgtcgccaaaggtgttagcgcacccaaacggcgcacctaccaatgttattggtgtggtctgcgagttctagcctactcgtttctcccccgaccattcactcacccacgaaaagtgtgttgtaaccataagatttaacccccgcacgggatgtgcgataaccgtaagactggctcaagcgcggaaagcgctgtaaccacatgctgttagtccctttatggctgcaagatggctacccacctcggatcactgaactggagctcgaccctccttagtaagggaaccgagaggccttcgtgcaacaagctccgacacagagtccacgtgactgctaccaccatgagtacatggttctcccctctcgacccaggacttctttttgaatatccacggctcgatccagagggtggggcatgacccctagcatagcgagctacagcgggaactgtagctaggccttagcgtgccttggatactgcctgatagggcgacggcctagtcgtgtcggttctataggtagcacatacaaatatgcagaactctcatttttctttcgatacagcctctggcacctttgaagatgtaaccggaacaaaagtcaagatcgttgaataccccagatcggtgaacaatggtgtttacgattcgtctactcatttggagatactgaacctacagggtgaaattgaaattttaaggtctttcaatgaataccaaattcgcgccgccaaacaacaactcggactggacatcgtgtacgaactacagggtaatgttcagacaacgtcaaagaatgattttgattcccgtggcaataatggtaacatgaccttcaattactacgcaaacacttatcagaattcagtagacttctcgacctcctcgtcggcgtcaggcgccggacctgggaactctcggggcggattagcgggtctcctcacaaatttcagtggaatcttgaaccctcttggctacctcaaatctggcgatatcgagaccaatcccgggccgagcaagggcgaggaggataacatggccatcatcaaggagttcatgcgcttcaaggtgcacatggagggctccgtgaacggccacgagttcgagatcgagggcgagggcgagggccgcccctacgagggcacccagaccgccaagctgaaggtgaccaagggtggccccctgcccttcgcctgggacatcctgtcccctcagttcatgtacggctccaaggcctacgtgaagcaccccgccgacatccccgactacttgaagctgtccttccccgagggcttcaagtgggagcgcgtgatgaacttcgaggacggcggcgtggtgaccgtgacccaggactcctccctgcaggacggcgagttcatctacaaggtgaagctgcgcggcaccaacttcccctccgacggccccgtaatgcagaagaagaccatgggctgggaggcctcctccgagcggatgtaccccgaggacggcgccctgaagggcgagatcaagcagaggctgaagctgaaggacggcggccactacgacgctgaggtcaagaccacctacaaggccaagaagcccgtgcagctgcccggcgcctacaacgtcaacatcaagttggacatcacctcccacaacgaggactacaccatcgtggaacagtacgaacgcgccgagggccgccactccaccggcggcatggacgagctgtacaaggagggcagaggaagtctgctaacatgcggtgacgtcgaggagaatcccgggcctgcttctgacaacccaattttggagtttcttgaagcagaaaatgatctagtcactctggcctctctctggaagatggtgcactctgttcaacagacctggagaaagtatgtgaagaacgatgatttttggcccaatttactcagcgagctagtgggggaaggctctgtcgccttggccgccacgctatccaaccaagcttcagtaaaggctcttttgggcctgcactttctctctcgggggctcaattacactgacttttactctttactgatagagaaatgctctagtttctttaccgtagaaccacctcctccaccagctgaaaacctgatgaccaagccctcagtgaagtcgaaattccgaaaactgtttaagatgcaaggacccatggacaaagtcaaagactggaaccaaatagctgccggcttgaagaattttcaatttgttcgtgacctagtcaaagaggtggtcgattggctgcaggcctggatcaacaaagagaaagccagccctgtcctccagtaccagttggagatgaagaagctcgggcctgtggccttggctcatgacgctttcatggctggttccgggccccctcttagcgacgaccagattgaatacctccagaacctcaaatctcttgccctaacactggggaagactaatttggcccaaagtctcaccactatgatcaatgccaaacaaagttcagcccaacgagttgaacccgttgtggtggtccttagaggcaagccgggatgcggcaagagcttggcctctacgttgattgcccaggctgtgtccaagcgcctctatggctcccaaagtgtatattctcttcccccagatccagatttcttcgatggatacaaaggacagttcgtgaccttgatggatgatttgggacaaaacccggatggacaagatttctccaccttttgtcagatggtgtcgaccgcccaatttctccccaacatggcggaccttgcagagaaagggcgtccctttacctccaatctcatcattgcaactacaaatctcccccacttcagtcctgtcaccattgctgatccttctgcagtctctcgccgtatcaactacgatctgactctagaagtatctgaggcctacaagaaacacacacggctgaattttgacttggctttcaggcgcacagacgccccccccatttatccttttgctgcccatgtgccctttgtggacgtagctgtgcgcttcaaaaatggtcaccagaattttaatctcctagagttggtcgattccatttgtacagacattcgagccaagcaacaaggtgcccgaaacatgcagactctggttctacagagccccaacgagaatgatgacacccccgtcgacgaggcgttgggtagagttctctcccccgctgcggtcgatgaggcgcttgtcgacctcactccagaggccgacccggttggccgtttggctattcttgccaagctaggtcttgccctagctgcggtcacccctggtctgataatcttggcagtgggactctacaggtacttctctggctctgatgcagaccaagaagaaacagaaagtgagggatctgtcaaggcacccaggagcgaaaatgcttatgacggcccgaagaaaaactctaagccccctggagcactctctctcatggaaatgcaacagcccaacgtggacatgggctttgaggctgcggtcgctaagaaagtggtcgtccccattaccttcatggttcccaacagaccttctgggcttacacagtccgctcttctggtgaccggccggaccttcctaatcaatgaacatacatggtccaatccctcctggaccagcttcacaatccgcggtgaggtacacactcgtgatgagcccttccaaacggttcatttcactcaccacggtattcccacagatctgatgatggtacgtctcggaccgggcaattctttccctaacaatctagacaagtttggacttgaccagatgccggcacgcaactcccgtgtggttggcgtttcgtccagttacggaaacttcttcttctctggaaatttcctcggatttgttgattccatcacctctgaacaaggaacttacgcaagactctttaggtacagggtgacgacctacaaaggatggtgcggctcggccctggtctgtgaggccggtggcgtccgacgcatcattggcctgcattctgctggcgccgccggtatcggcgccgggacctatatctcaaaattaggactaatcaaagccctgaaacacctcggtgaacctttggccacaatgcaaggactgatgactgaattagagcctggaatcaccgtacatgtaccccggaaatccaaattgagaaagacgaccgcacacgcggtgtacaaaccggagtttgagcctgctgtgttgtcaaaatttgatcccagactgaacaaggatgttgacttggatgaagtaatttggtctaaacacactgccaatgtcccttaccaacctcctttgttctacacatacatgtcagagtacgctcatcgagtcttctccttcttggggaaagacaatgacattctgaccgtcaaagaagcaattctgggcatccccggactagaccccatggatccccacacagctccgggtctgccttacgccatcaacggccttcgacgtactgatctcgtcgattttgtgaacggtacagtagatgcggcgctggctgtacaaatccagaaattcttagacggtgactactctgaccatgtcttccaaacttttctgaaagatgagatcagaccctcagagaaagtccgagcgggaaaaacccgcattgttgatgtgccctccctggcgcattgcattgtgggcagaatgttgcttgggcgctttgctgccaagtttcaatcccatcctggctttctcctcggctctgctatcgggtctgaccctgatgttttctggaccgtcataggggctcaactcgaggggagaaagaacacgtatgacgtggactacagtgcctttgactcttcacacggcactggctccttcgaggctctcatctctcactttttcaccgtggacaatggttttagccctgcgctgggaccgtatctcagatccctggctgtctcggtgcacgcttacggcgagcgtcgcatcaagattaccggtggcctcccctccggttgtgccgcgaccagcctgctgaacacagtgctcaacaatgtgatcatcaggactgctctggcattgacttacaaggaatttgaatatgacatggttgatatcatcgcctacggtgacgaccttctggttggcacggattacgatctggacttcaatgaggtggcacgacgcgctgccaagttggggtataagatgactcctgccaacaagggttctgtcttccctccgacttcctctctttccgatgctgtttttctaaagcgcaaattcgtccaaaacaacgacggcttatacaaaccagttatggatttaaagaatttggaagccatgctctcctacttcaaaccaggaacactactcgagaagctgcaatctgtttctatgttggctcaacattctggaaaagaagaatatgatagattgatgcaccccttcgctgactacggtgccgtaccgagtcacgagtacctgcaggcaagatggagggccttgttcgactgacccagatagcccaaggcgcttcggtgctgccggcgattctgggagaactcagtcggaacagaaaagggaaaaaaaaaaaaaaaaaaaaaaaaaaaaaaggccggcatggtcccagcctcctcgctggcgccggctgggcaacatgcttcggcatggcgaatgggacgcggccgctcgagtctagagggcccgtttaaacccgctgatcagcctcgactgtgccttctagttgccagccatctgttgtttgcccctcccccgtgccttccttgaccctggaaggtgccactcccactgtcctttcctaataaaatgaggaaattgcatcgcattgtctgagtaggtgtcattctattctggggggtggggtggggcaggacagcaagggggaggattgggaagacaatagcaggcatgctggggatgcggtgggctctatggtgctggcgtttttccataggctc

SEQ ID NO: 32 - RNA, 5705 nt, Artificial Sequence
  NEP-BV-SVV-mCh Trunc6 RNA
uuugaaauggggggcugggcccugaugcccaguccuuccuuuccccuuccgggggguuaaccggcuguguuugcuagaggcacagaggggcaacauccaaccugcuuuugcggggaacggugcggcuccgauuccugcgucgccaaagguguuagcgcacccaaacggcgcaccuaccaauguuauugguguggucugcgaguucuagccuacucguuucucccccgaccauucacucacccacgaaaaguguguuguaaccauaagauuuaacccccgcacgggaugugcgauaaccguaagacuggcucaagcgcggaaagcgcuguaaccacaugcuguuagucccuuuauggcugcaagauggcuacccaccucggaucacugaacuggagcucgacccuccuuaguaagggaaccgagaggccuucgugcaacaagcuccgacacagaguccacgugacugcuaccaccaugaguacaugguucuccccucucgacccaggacuucuuuuugaauauccacggcucgauccagaggguggggcaugaccccuagcauagcgagcuacagcgggaacuguagcuaggccuuagcgugccuuggauacugccugauagggcgacggccuagucgugucgguucuauagguagcacauacaaauaugcagaacucucauuuuucuuucgauacagccucuggcaccuuugaagauguaaccggaacaaaagucaagaucguugaauaccccagaucggugaacaaugguguuuacgauucgucuacucauuuggagauacugaaccuacagggugaaauugaaauuuuaaggucuuucaaugaauaccaaauucgcgccgccaaacaacaacucggacuggacaucguguacgaacuacaggguaauguucagacaacgucaaagaaugauuuugauucccguggcaauaaugguaacaugaccuucaauuacuacgcaaacacuuaucagaauucaguagacuucucgaccuccucgucggcgucaggcgccggaccugggaacucucggggcggauuagcgggucuccucacaaauuucaguggaaucuugaacccucuuggcuaccucaaaucuggcgauaucgagaccaaucccgggccgagcaagggcgaggaggauaacauggccaucaucaaggaguucaugcgcuucaaggugcacauggagggcuccgugaacggccacgaguucgagaucgagggcgagggcgagggccgccccuacgagggcacccagaccgccaagcugaaggugaccaaggguggcccccugcccuucgccugggacauccuguccccucaguucauguacggcuccaaggccuacgugaagcaccccgccgacauccccgacuacuugaagcuguccuuccccgagggcuucaagugggagcgcgugaugaacuucgaggacggcggcguggugaccgugacccaggacuccucccugcaggacggcgaguucaucuacaaggugaagcugcgcggcaccaacuuccccuccgacggccccguaaugcagaagaagaccaugggcugggaggccuccuccgagcggauguaccccgaggacggcgcccugaagggcgagaucaagcagaggcugaagcugaaggacggcggccacuacgacgcugaggucaagaccaccuacaaggccaagaagcccgugcagcugcccggcgccuacaacgucaacaucaaguuggacaucaccucccacaacgaggacuacaccaucguggaacaguacgaacgcgccgagggccgccacuccaccggcggcauggacgagcuguacaaggagggcagaggaagucugcuaacaugcggugacgucgaggagaaucccgggccugcuucugacaacccaauuuuggaguuucuugaagcagaaaaugaucuagucacucuggccucucucuggaagauggugcacucuguucaacagaccuggagaaaguaugugaagaacgaugauuuuuggcccaauuuacucagcgagcuagugggggaaggcucugucgccuuggccgccacgcuauccaaccaagcuucaguaaaggcucuuuugggccugcacuuucucucucgggggcucaauuacacugacuuuuacucuuuacugauagagaaaugcucuaguuucuuuaccguagaaccaccuccuccaccagcugaaaaccugaugaccaagcccucagugaagucgaaauuccgaaaacuguuuaagaugcaaggacccauggacaaagucaaagacuggaaccaaauagcugccggcuugaagaauuuucaauuuguucgugaccuagucaaagagguggucgauuggcugcaggccuggaucaacaaagagaaagccagcccuguccuccaguaccaguuggagaugaagaagcucgggccuguggccuuggcucaugacgcuuucauggcugguuccgggcccccucuuagcgacgaccagauugaauaccuccagaaccucaaaucucuugcccuaacacuggggaagacuaauuuggcccaaagucucaccacuaugaucaaugccaaacaaaguucagcccaacgaguugaacccguuguggugguccuuagaggcaagccgggaugcggcaagagcuuggccucuacguugauugcccaggcuguguccaagcgccucuauggcucccaaaguguauauucucuucccccagauccagauuucuucgauggauacaaaggacaguucgugaccuugauggaugauuugggacaaaacccggauggacaagauuucuccaccuuuugucagauggugucgaccgcccaauuucuccccaacauggcggaccuugcagagaaagggcgucccuuuaccuccaaucucaucauugcaacuacaaaucucccccacuucaguccugucaccauugcugauccuucugcagucucucgccguaucaacuacgaucugacucuagaaguaucugaggccuacaagaaacacacacggcugaauuuugacuuggcuuucaggcgcacagacgccccccccauuuauccuuuugcugcccaugugcccuuuguggacguagcugugcgcuucaaaaauggucaccagaauuuuaaucuccuagaguuggucgauuccauuuguacagacauucgagccaagcaacaaggugcccgaaacaugcagacucugguucuacagagccccaacgagaaugaugacacccccgucgacgaggcguuggguagaguucucucccccgcugcggucgaugaggcgcuugucgaccucacuccagaggccgacccgguuggccguuuggcuauucuugccaagcuaggucuugcccuagcugcggucaccccuggucugauaaucuuggcagugggacucuacagguacuucucuggcucugaugcagaccaagaagaaacagaaagugagggaucugucaaggcacccaggagcgaaaaugcuuaugacggcccgaagaaaaacucuaagcccccuggagcacucucucucauggaaaugcaacagcccaacguggacaugggcuuugaggcugcggucgcuaagaaaguggucguccccauuaccuucaugguucccaacagaccuucugggcuuacacaguccgcucuucuggugaccggccggaccuuccuaaucaaugaacauacaugguccaaucccuccuggaccagcuucacaauccgcggugagguacacacucgugaugagcccuuccaaacgguucauuucacucaccacgguauucccacagaucugaugaugguacgucucggaccgggcaauucuuucccuaacaaucuagacaaguuuggacuugaccagaugccggcacgcaacucccgugugguuggcguuucguccaguuacggaaacuucuucuucucuggaaauuuccucggauuuguugauuccaucaccucugaacaaggaacuuacgcaagacucuuuagguacagggugacgaccuacaaaggauggugcggcucggcccuggucugugaggccgguggcguccgacgcaucauuggccugcauucugcuggcgccgccgguaucggcgccgggaccuauaucucaaaauuaggacuaaucaaagcccugaaacaccucggugaaccuuuggccacaaugcaaggacugaugacugaauuagagccuggaaucaccguacauguaccccggaaauccaaauugagaaagacgaccgcacacgcgguguacaaaccggaguuugagccugcuguguugucaaaauuugaucccagacugaacaaggauguugacuuggaugaaguaauuuggucuaaacacacugccaaugucccuuaccaaccuccuuuguucuacacauacaugucagaguacgcucaucgagucuucuccuucuuggggaaagacaaugacauucugaccgucaaagaagcaauucugggcauccccggacuagaccccauggauccccacacagcuccgggucugccuuacgccaucaacggccuucgacguacugaucucgucgauuuugugaacgguacaguagaugcggcgcuggcuguacaaauccagaaauucuuagacggugacuacucugaccaugucuuccaaacuuuucugaaagaugagaucagacccucagagaaaguccgagcgggaaaaacccgcauuguugaugugcccucccuggcgcauugcauugugggcagaauguugcuugggcgcuuugcugccaaguuucaaucccauccuggcuuucuccucggcucugcuaucgggucugacccugauguuuucuggaccgucauaggggcucaacucgaggggagaaagaacacguaugacguggacuacagugccuuugacucuucacacggcacuggcuccuucgaggcucucaucucucacuuuuucaccguggacaaugguuuuagcccugcgcugggaccguaucucagaucccuggcugucucggugcacgcuuacggcgagcgucgcaucaagauuaccgguggccuccccuccgguugugccgcgaccagccugcugaacacagugcucaacaaugugaucaucaggacugcucuggcauugacuuacaaggaauuugaauaugacaugguugauaucaucgccuacggugacgaccuucugguuggcacggauuacgaucuggacuucaaugagguggcacgacgcgcugccaaguugggguauaagaugacuccugccaacaaggguucugucuucccuccgacuuccucucuuuccgaugcuguuuuucuaaagcgcaaauucguccaaaacaacgacggcuuauacaaaccaguuauggauuuaaagaauuuggaagccaugcucuccuacuucaaaccaggaacacuacucgagaagcugcaaucuguuucuauguuggcucaacauucuggaaaagaagaauaugauagauugaugcaccccuucgcugacuacggugccguaccgagucacgaguaccugcaggcaagauggagggccuuguucgacugacccagauagcccaaggcgcuucggugcugccggcgauucugggagaacucagucggaacagaaaagggaaaaaaaaaaaaaaaaaaaaaaaaaaaaaa

SEQ ID NO: 33 - DNA, 7810 bp, Artificial Sequence
  NEP-BV-SVV-mCh Trunc7
cgcccccctgacgagcatcacaaaaatcgacgctcaagtcagaggtggcgaaacccgacaggactataaagataccaggcgtttccccctggaagctccctcgtgcgctctcctgttccgaccctgccgcttaccggatacctgtccgcctttctcccttcgggaagcgtggcgctttctcatagctcacgctgtaggtatctcagttcggtgtaggtcgttcgctccaagctgggctgtgtgcacgaaccccccgttcagcccgaccgctgcgccttatccggtaactatcgtcttgagtccaacccggtaagacacgacttatcgccactggcagcagccactggtaacaggattagcagagcgaggtatgtaggcggtgctacagagttcttgaagtggtggcctaactacggctacactagaagaacagtatttggtatctgcgctctgctgaagccagttaccttcggaaaaagagttggtagctcttgatccggcaaacaaaccaccgctggtagcggtggtttttttgtttgcaagcagcagattacgcgcagaaaaaaaggatctcaagaagatccttttaaaaaaattcatccaacaaacgataaaatgcaatacgttgactatctggtgctgcaataccatataaaactaaaaaacgatctgcccattcaccacctaattcttctgcaatatcacgagttgctaatgcaatatcttgataacgatctgcaacacctaaacgaccacaatcaatgaaaccactaaaacgaccattttcaaccataatatttggtaaacatgcatcaccatgagtaacaactaaatcttcaccatctggcatacttgcttttaaacgtgcaaacaattctgctggtgctaaaccttgatgttcttcatctaaatcatcttgatcaactaaacctgcttccatacgagtacgtgcacgttcaatacgatgttttgcttgatgatcaaatggacaagttgctggatctaaagtatgtaaacgacgcattgcatctgccataatactaactttttctgctggtgctaaatgactagataacaaatcttgacctggaacttcacctaacaacaaccaatcacgacctgcttcagtaacaacatctaaaactgctgcacatggaacaccagtagttgctaaccaacttaaacgtgctgcttcatcttgtaattcatttaatgcaccacttaaatcagttttaacaaacaaaactggacgaccttgtgcacttaaacgaaaaactgctgcatcagaacaaccaatagtttgttgtgcccaatcataaccaaacaaacgttcaacccatgctgctggactacctgcatgtaaaccatcttgttcaatcatactcttcctttttcaatattattgaagcatttatcagggttattgtctcatgagcggatacatatttgaagaattcacattgattattgactagttattaatagtaatcaattacggggtcattagttcatagcccatatatggagttccgcgttacataacttacggtaaatggcccgcctggctgaccgcccaacgacccccgcccattgacgtcaataatgacgtatgttcccatagtaacgccaatagggactttccattgacgtcaatgggtggagtatttacggtaaactgcccacttggcagtacatcaagtgtatcatatgccaagtacgccccctattgacgtcaatgacggtaaatggcccgcctggcattatgcccagtacatgaccttatgggactttcctacttggcagtacatctacgtattagtcatcgctattaccatggtgatgcggttttggcagtacatcaatgggcgtggatagcggtttgactcacggggatttccaagtctccaccccattgacgtcaatgggagtttgttttggcaccaaaatcaacgggactttccaaaatgtcgtaacaactccgccccattgacgcaaatgggcggtaggcgtgtacggtgggaggtctatataagcagagctctctggctaactagagaacccactgcttactggcttatcgaaattaatacgactcactatagggagacccaagctggctagcgtttaaacttaagcttggtaccttatcaaactgatgagtccgtgaggacgaaacgagtaagctcgtctttgaaatggggggctgggccctgatgcccagtccttcctttccccttccggggggttaaccggctgtgtttgctagaggcacagaggggcaacatccaacctgcttttgcggggaacggtgcggctccgattcctgcgtcgccaaaggtgttagcgcacccaaacggcgcacctaccaatgttattggtgtggtctgcgagttctagcctactcgtttctcccccgaccattcactcacccacgaaaagtgtgttgtaaccataagatttaacccccgcacgggatgtgcgataaccgtaagactggctcaagcgcggaaagcgctgtaaccacatgctgttagtccctttatggctgcaagatggctacccacctcggatcactgaactggagctcgaccctccttagtaagggaaccgagaggccttcgtgcaacaagctccgacacagagtccacgtgactgctaccaccatgagtacatggttctcccctctcgacccaggacttctttttgaatatccacggctcgatccagagggtggggcatgacccctagcatagcgagctacagcgggaactgtagctaggccttagcgtgccttggatactgcctgatagggcgacggcctagtcgtgtcggttctataggtagcacatacaaattctggcgatatcgagaccaatcccgggccgagcaagggcgaggaggataacatggccatcatcaaggagttcatgcgcttcaaggtgcacatggagggctccgtgaacggccacgagttcgagatcgagggcgagggcgagggccgcccctacgagggcacccagaccgccaagctgaaggtgaccaagggtggccccctgcccttcgcctgggacatcctgtcccctcagttcatgtacggctccaaggcctacgtgaagcaccccgccgacatccccgactacttgaagctgtccttccccgagggcttcaagtgggagcgcgtgatgaacttcgaggacggcggcgtggtgaccgtgacccaggactcctccctgcaggacggcgagttcatctacaaggtgaagctgcgcggcaccaacttcccctccgacggccccgtaatgcagaagaagaccatgggctgggaggcctcctccgagcggatgtaccccgaggacggcgccctgaagggcgagatcaagcagaggctgaagctgaaggacggcggccactacgacgctgaggtcaagaccacctacaaggccaagaagcccgtgcagctgcccggcgcctacaacgtcaacatcaagttggacatcacctcccacaacgaggactacaccatcgtggaacagtacgaacgcgccgagggccgccactccaccggcggcatggacgagctgtacaaggagggcagaggaagtctgctaacatgcggtgacgtcgaggagaatcccgggcctgcttctgacaacccaattttggagtttcttgaagcagaaaatgatctagtcactctggcctctctctggaagatggtgcactctgttcaacagacctggagaaagtatgtgaagaacgatgatttttggcccaatttactcagcgagctagtgggggaaggctctgtcgccttggccgccacgctatccaaccaagcttcagtaaaggctcttttgggcctgcactttctctctcgggggctcaattacactgacttttactctttactgatagagaaatgctctagtttctttaccgtagaaccacctcctccaccagctgaaaacctgatgaccaagccctcagtgaagtcgaaattccgaaaactgtttaagatgcaaggacccatggacaaagtcaaagactggaaccaaatagctgccggcttgaagaattttcaatttgttcgtgacctagtcaaagaggtggtcgattggctgcaggcctggatcaacaaagagaaagccagccctgtcctccagtaccagttggagatgaagaagctcgggcctgtggccttggctcatgacgctttcatggctggttccgggccccctcttagcgacgaccagattgaatacctccagaacctcaaatctcttgccctaacactggggaagactaatttggcccaaagtctcaccactatgatcaatgccaaacaaagttcagcccaacgagttgaacccgttgtggtggtccttagaggcaagccgggatgcggcaagagcttggcctctacgttgattgcccaggctgtgtccaagcgcctctatggctcccaaagtgtatattctcttcccccagatccagatttcttcgatggatacaaaggacagttcgtgaccttgatggatgatttgggacaaaacccggatggacaagatttctccaccttttgtcagatggtgtcgaccgcccaatttctccccaacatggcggaccttgcagagaaagggcgtccctttacctccaatctcatcattgcaactacaaatctcccccacttcagtcctgtcaccattgctgatccttctgcagtctctcgccgtatcaactacgatctgactctagaagtatctgaggcctacaagaaacacacacggctgaattttgacttggctttcaggcgcacagacgccccccccatttatccttttgctgcccatgtgccctttgtggacgtagctgtgcgcttcaaaaatggtcaccagaattttaatctcctagagttggtcgattccatttgtacagacattcgagccaagcaacaaggtgcccgaaacatgcagactctggttctacagagccccaacgagaatgatgacacccccgtcgacgaggcgttgggtagagttctctcccccgctgcggtcgatgaggcgcttgtcgacctcactccagaggccgacccggttggccgtttggctattcttgccaagctaggtcttgccctagctgcggtcacccctggtctgataatcttggcagtgggactctacaggtacttctctggctctgatgcagaccaagaagaaacagaaagtgagggatctgtcaaggcacccaggagcgaaaatgcttatgacggcccgaagaaaaactctaagccccctggagcactctctctcatggaaatgcaacagcccaacgtggacatgggctttgaggctgcggtcgctaagaaagtggtcgtccccattaccttcatggttcccaacagaccttctgggcttacacagtccgctcttctggtgaccggccggaccttcctaatcaatgaacatacatggtccaatccctcctggaccagcttcacaatccgcggtgaggtacacactcgtgatgagcccttccaaacggttcatttcactcaccacggtattcccacagatctgatgatggtacgtctcggaccgggcaattctttccctaacaatctagacaagtttggacttgaccagatgccggcacgcaactcccgtgtggttggcgtttcgtccagttacggaaacttcttcttctctggaaatttcctcggatttgttgattccatcacctctgaacaaggaacttacgcaagactctttaggtacagggtgacgacctacaaaggatggtgcggctcggccctggtctgtgaggccggtggcgtccgacgcatcattggcctgcattctgctggcgccgccggtatcggcgccgggacctatatctcaaaattaggactaatcaaagccctgaaacacctcggtgaacctttggccacaatgcaaggactgatgactgaattagagcctggaatcaccgtacatgtaccccggaaatccaaattgagaaagacgaccgcacacgcggtgtacaaaccggagtttgagcctgctgtgttgtcaaaatttgatcccagactgaacaaggatgttgacttggatgaagtaatttggtctaaacacactgccaatgtcccttaccaacctcctttgttctacacatacatgtcagagtacgctcatcgagtcttctccttcttggggaaagacaatgacattctgaccgtcaaagaagcaattctgggcatccccggactagaccccatggatccccacacagctccgggtctgccttacgccatcaacggccttcgacgtactgatctcgtcgattttgtgaacggtacagtagatgcggcgctggctgtacaaatccagaaattcttagacggtgactactctgaccatgtcttccaaacttttctgaaagatgagatcagaccctcagagaaagtccgagcgggaaaaacccgcattgttgatgtgccctccctggcgcattgcattgtgggcagaatgttgcttgggcgctttgctgccaagtttcaatcccatcctggctttctcctcggctctgctatcgggtctgaccctgatgttttctggaccgtcataggggctcaactcgaggggagaaagaacacgtatgacgtggactacagtgcctttgactcttcacacggcactggctccttcgaggctctcatctctcactttttcaccgtggacaatggttttagccctgcgctgggaccgtatctcagatccctggctgtctcggtgcacgcttacggcgagcgtcgcatcaagattaccggtggcctcccctccggttgtgccgcgaccagcctgctgaacacagtgctcaacaatgtgatcatcaggactgctctggcattgacttacaaggaatttgaatatgacatggttgatatcatcgcctacggtgacgaccttctggttggcacggattacgatctggacttcaatgaggtggcacgacgcgctgccaagttggggtataagatgactcctgccaacaagggttctgtcttccctccgacttcctctctttccgatgctgtttttctaaagcgcaaattcgtccaaaacaacgacggcttatacaaaccagttatggatttaaagaatttggaagccatgctctcctacttcaaaccaggaacactactcgagaagctgcaatctgtttctatgttggctcaacattctggaaaagaagaatatgatagattgatgcaccccttcgctgactacggtgccgtaccgagtcacgagtacctgcaggcaagatggagggccttgttcgactgacccagatagcccaaggcgcttcggtgctgccggcgattctgggagaactcagtcggaacagaaaagggaaaaaaaaaaaaaaaaaaaaaaaaaaaaaaggccggcatggtcccagcctcctcgctggcgccggctgggcaacatgcttcggcatggcgaatgggacgcggccgctcgagtctagagggcccgtttaaacccgctgatcagcctcgactgtgccttctagttgccagccatctgttgtttgcccctcccccgtgccttccttgaccctggaaggtgccactcccactgtcctttcctaataaaatgaggaaattgcatcgcattgtctgagtaggtgtcattctattctggggggtggggtggggcaggacagcaagggggaggattgggaagacaatagcaggcatgctggggatgcggtgggctctatggtgctggcgtttttccataggctc

SEQ ID NO: 34 - RNA, 5255 nt, Artificial Sequence
  NEP-BV-SVV-mCh Trunc7 RNA
uuugaaauggggggcugggcccugaugcccaguccuuccuuuccccuuccgggggguuaaccggcuguguuugcuagaggcacagaggggcaacauccaaccugcuuuugcggggaacggugcggcuccgauuccugcgucgccaaagguguuagcgcacccaaacggcgcaccuaccaauguuauugguguggucugcgaguucuagccuacucguuucucccccgaccauucacucacccacgaaaaguguguuguaaccauaagauuuaacccccgcacgggaugugcgauaaccguaagacuggcucaagcgcggaaagcgcuguaaccacaugcuguuagucccuuuauggcugcaagauggcuacccaccucggaucacugaacuggagcucgacccuccuuaguaagggaaccgagaggccuucgugcaacaagcuccgacacagaguccacgugacugcuaccaccaugaguacaugguucuccccucucgacccaggacuucuuuuugaauauccacggcucgauccagaggguggggcaugaccccuagcauagcgagcuacagcgggaacuguagcuaggccuuagcgugccuuggauacugccugauagggcgacggccuagucgugucgguucuauagguagcacauacaaauucuggcgauaucgagaccaaucccgggccgagcaagggcgaggaggauaacauggccaucaucaaggaguucaugcgcuucaaggugcacauggagggcuccgugaacggccacgaguucgagaucgagggcgagggcgagggccgccccuacgagggcacccagaccgccaagcugaaggugaccaaggguggcccccugcccuucgccugggacauccuguccccucaguucauguacggcuccaaggccuacgugaagcaccccgccgacauccccgacuacuugaagcuguccuuccccgagggcuucaagugggagcgcgugaugaacuucgaggacggcggcguggugaccgugacccaggacuccucccugcaggacggcgaguucaucuacaaggugaagcugcgcggcaccaacuuccccuccgacggccccguaaugcagaagaagaccaugggcugggaggccuccuccgagcggauguaccccgaggacggcgcccugaagggcgagaucaagcagaggcugaagcugaaggacggcggccacuacgacgcugaggucaagaccaccuacaaggccaagaagcccgugcagcugcccggcgccuacaacgucaacaucaaguuggacaucaccucccacaacgaggacuacaccaucguggaacaguacgaacgcgccgagggccgccacuccaccggcggcauggacgagcuguacaaggagggcagaggaagucugcuaacaugcggugacgucgaggagaaucccgggccugcuucugacaacccaauuuuggaguuucuugaagcagaaaaugaucuagucacucuggccucucucuggaagauggugcacucuguucaacagaccuggagaaaguaugugaagaacgaugauuuuuggcccaauuuacucagcgagcuagugggggaaggcucugucgccuuggccgccacgcuauccaaccaagcuucaguaaaggcucuuuugggccugcacuuucucucucgggggcucaauuacacugacuuuuacucuuuacugauagagaaaugcucuaguuucuuuaccguagaaccaccuccuccaccagcugaaaaccugaugaccaagcccucagugaagucgaaauuccgaaaacuguuuaagaugcaaggacccauggacaaagucaaagacuggaaccaaauagcugccggcuugaagaauuuucaauuuguucgugaccuagucaaagagguggucgauuggcugcaggccuggaucaacaaagagaaagccagcccuguccuccaguaccaguuggagaugaagaagcucgggccuguggccuuggcucaugacgcuuucauggcugguuccgggcccccucuuagcgacgaccagauugaauaccuccagaaccucaaaucucuugcccuaacacuggggaagacuaauuuggcccaaagucucaccacuaugaucaaugccaaacaaaguucagcccaacgaguugaacccguuguggugguccuuagaggcaagccgggaugcggcaagagcuuggccucuacguugauugcccaggcuguguccaagcgccucuauggcucccaaaguguauauucucuucccccagauccagauuucuucgauggauacaaaggacaguucgugaccuugauggaugauuugggacaaaacccggauggacaagauuucuccaccuuuugucagauggugucgaccgcccaauuucuccccaacauggcggaccuugcagagaaagggcgucccuuuaccuccaaucucaucauugcaacuacaaaucucccccacuucaguccugucaccauugcugauccuucugcagucucucgccguaucaacuacgaucugacucuagaaguaucugaggccuacaagaaacacacacggcugaauuuugacuuggcuuucaggcgcacagacgccccccccauuuauccuuuugcugcccaugugcccuuuguggacguagcugugcgcuucaaaaauggucaccagaauuuuaaucuccuagaguuggucgauuccauuuguacagacauucgagccaagcaacaaggugcccgaaacaugcagacucugguucuacagagccccaacgagaaugaugacacccccgucgacgaggcguuggguagaguucucucccccgcugcggucgaugaggcgcuugucgaccucacuccagaggccgacccgguuggccguuuggcuauucuugccaagcuaggucuugcccuagcugcggucaccccuggucugauaaucuuggcagugggacucuacagguacuucucuggcucugaugcagaccaagaagaaacagaaagugagggaucugucaaggcacccaggagcgaaaaugcuuaugacggcccgaagaaaaacucuaagcccccuggagcacucucucucauggaaaugcaacagcccaacguggacaugggcuuugaggcugcggucgcuaagaaaguggucguccccauuaccuucaugguucccaacagaccuucugggcuuacacaguccgcucuucuggugaccggccggaccuuccuaaucaaugaacauacaugguccaaucccuccuggaccagcuucacaauccgcggugagguacacacucgugaugagcccuuccaaacgguucauuucacucaccacgguauucccacagaucugaugaugguacgucucggaccgggcaauucuuucccuaacaaucuagacaaguuuggacuugaccagaugccggcacgcaacucccgugugguuggcguuucguccaguuacggaaacuucuucuucucuggaaauuuccucggauuuguugauuccaucaccucugaacaaggaacuuacgcaagacucuuuagguacagggugacgaccuacaaaggauggugcggcucggcccuggucugugaggccgguggcguccgacgcaucauuggccugcauucugcuggcgccgccgguaucggcgccgggaccuauaucucaaaauuaggacuaaucaaagcccugaaacaccucggugaaccuuuggccacaaugcaaggacugaugacugaauuagagccuggaaucaccguacauguaccccggaaauccaaauugagaaagacgaccgcacacgcgguguacaaaccggaguuugagccugcuguguugucaaaauuugaucccagacugaacaaggauguugacuuggaugaaguaauuuggucuaaacacacugccaaugucccuuaccaaccuccuuuguucuacacauacaugucagaguacgcucaucgagucuucuccuucuuggggaaagacaaugacauucugaccgucaaagaagcaauucugggcauccccggacuagaccccauggauccccacacagcuccgggucugccuuacgccaucaacggccuucgacguacugaucucgucgauuuugugaacgguacaguagaugcggcgcuggcuguacaaauccagaaauucuuagacggugacuacucugaccaugucuuccaaacuuuucugaaagaugagaucagacccucagagaaaguccgagcgggaaaaacccgcauuguugaugugcccucccuggcgcauugcauugugggcagaauguugcuugggcgcuuugcugccaaguuucaaucccauccuggcuuucuccucggcucugcuaucgggucugacccugauguuuucuggaccgucauaggggcucaacucgaggggagaaagaacacguaugacguggacuacagugccuuugacucuucacacggcacuggcuccuucgaggcucucaucucucacuuuuucaccguggacaaugguuuuagcccugcgcugggaccguaucucagaucccuggcugucucggugcacgcuuacggcgagcgucgcaucaagauuaccgguggccuccccuccgguugugccgcgaccagccugcugaacacagugcucaacaaugugaucaucaggacugcucuggcauugacuuacaaggaauuugaauaugacaugguugauaucaucgccuacggugacgaccuucugguuggcacggauuacgaucuggacuucaaugagguggcacgacgcgcugccaaguugggguauaagaugacuccugccaacaaggguucugucuucccuccgacuuccucucuuuccgaugcuguuuuucuaaagcgcaaauucguccaaaacaacgacggcuuauacaaaccaguuauggauuuaaagaauuuggaagccaugcucuccuacuucaaaccaggaacacuacucgagaagcugcaaucuguuucuauguuggcucaacauucuggaaaagaagaauaugauagauugaugcaccccuucgcugacuacggugccguaccgagucacgaguaccugcaggcaagauggagggccuuguucgacugacccagauagcccaaggcgcuucggugcugccggcgauucugggagaacucagucggaacagaaaagggaaaaaaaaaaaaaaaaaaaaaaaaaaaaaa

SEQ ID NO: 35 - DNA, 8551 bp, Artificial Sequence
  NEP-BV-SVV-mCh Trunc8
cgcccccctgacgagcatcacaaaaatcgacgctcaagtcagaggtggcgaaacccgacaggactataaagataccaggcgtttccccctggaagctccctcgtgcgctctcctgttccgaccctgccgcttaccggatacctgtccgcctttctcccttcgggaagcgtggcgctttctcatagctcacgctgtaggtatctcagttcggtgtaggtcgttcgctccaagctgggctgtgtgcacgaaccccccgttcagcccgaccgctgcgccttatccggtaactatcgtcttgagtccaacccggtaagacacgacttatcgccactggcagcagccactggtaacaggattagcagagcgaggtatgtaggcggtgctacagagttcttgaagtggtggcctaactacggctacactagaagaacagtatttggtatctgcgctctgctgaagccagttaccttcggaaaaagagttggtagctcttgatccggcaaacaaaccaccgctggtagcggtggtttttttgtttgcaagcagcagattacgcgcagaaaaaaaggatctcaagaagatccttttaaaaaaattcatccaacaaacgataaaatgcaatacgttgactatctggtgctgcaataccatataaaactaaaaaacgatctgcccattcaccacctaattcttctgcaatatcacgagttgctaatgcaatatcttgataacgatctgcaacacctaaacgaccacaatcaatgaaaccactaaaacgaccattttcaaccataatatttggtaaacatgcatcaccatgagtaacaactaaatcttcaccatctggcatacttgcttttaaacgtgcaaacaattctgctggtgctaaaccttgatgttcttcatctaaatcatcttgatcaactaaacctgcttccatacgagtacgtgcacgttcaatacgatgttttgcttgatgatcaaatggacaagttgctggatctaaagtatgtaaacgacgcattgcatctgccataatactaactttttctgctggtgctaaatgactagataacaaatcttgacctggaacttcacctaacaacaaccaatcacgacctgcttcagtaacaacatctaaaactgctgcacatggaacaccagtagttgctaaccaacttaaacgtgctgcttcatcttgtaattcatttaatgcaccacttaaatcagttttaacaaacaaaactggacgaccttgtgcacttaaacgaaaaactgctgcatcagaacaaccaatagtttgttgtgcccaatcataaccaaacaaacgttcaacccatgctgctggactacctgcatgtaaaccatcttgttcaatcatactcttcctttttcaatattattgaagcatttatcagggttattgtctcatgagcggatacatatttgaagaattcacattgattattgactagttattaatagtaatcaattacggggtcattagttcatagcccatatatggagttccgcgttacataacttacggtaaatggcccgcctggctgaccgcccaacgacccccgcccattgacgtcaataatgacgtatgttcccatagtaacgccaatagggactttccattgacgtcaatgggtggagtatttacggtaaactgcccacttggcagtacatcaagtgtatcatatgccaagtacgccccctattgacgtcaatgacggtaaatggcccgcctggcattatgcccagtacatgaccttatgggactttcctacttggcagtacatctacgtattagtcatcgctattaccatggtgatgcggttttggcagtacatcaatgggcgtggatagcggtttgactcacggggatttccaagtctccaccccattgacgtcaatgggagtttgttttggcaccaaaatcaacgggactttccaaaatgtcgtaacaactccgccccattgacgcaaatgggcggtaggcgtgtacggtgggaggtctatataagcagagctctctggctaactagagaacccactgcttactggcttatcgaaattaatacgactcactatagggagacccaagctggctagcgtttaaacttaagcttggtaccttatcaaactgatgagtccgtgaggacgaaacgagtaagctcgtctttgaaatggggggctgggccctgatgcccagtccttcctttccccttccggggggttaaccggctgtgtttgctagaggcacagaggggcaacatccaacctgcttttgcggggaacggtgcggctccgattcctgcgtcgccaaaggtgttagcgcacccaaacggcgcacctaccaatgttattggtgtggtctgcgagttctagcctactcgtttctcccccgaccattcactcacccacgaaaagtgtgttgtaaccataagatttaacccccgcacgggatgtgcgataaccgtaagactggctcaagcgcggaaagcgctgtaaccacatgctgttagtccctttatggctgcaagatggctacccacctcggatcactgaactggagctcgaccctccttagtaagggaaccgagaggccttcgtgcaacaagctccgacacagagtccacgtgactgctaccaccatgagtacatggttctcccctctcgacccaggacttctttttgaatatccacggctcgatccagagggtggggcatgacccctagcatagcgagctacagcgggaactgtagctaggccttagcgtgccttggatactgcctgatagggcgacggcctagtcgtgtcggttctataggtagcacatacaaatatgcagaactctcatttttctttcgatacagcctctggcacctttgaagatgtaaccggaacaaaagtcaagatcgttgaataccccagatcggtgaacaatggtgtttacgattcgtctactcatttggagatactgaacctacagggtgaaattgaaattttaaggtctttcaatgaataccaaattcgcgccgccaaacaacaactcggactggacatcgtgtacgaactacagggtaatgttcagacaacgtcaaagaatgattttgattcccgtggcaataatggtaacatgaccttcaattactacgcaaacacttatcagaattcagtagacttctcgacctcctcgtcggcgtcaggcgccggacctgggaactctcggggcggattagcgggtctcctcacaaatttcagtggaatcttgaaccctcttggctacctcaaagatcacaacaccgaagaaatggaaaactctgctgatcgagtcacaacgcaaacggcgggcaacactgccataaacacgcaatcatcattgggtgtgttgtgtgcctacgttgaagacccgaccaaatctgatcctccgtccagcagcacagatcaacccaccaccactttcactgccatcgacaggtggtacactggacgtctcaattcttggacaaaagctgtaaaaaccttctcttttcaggccgtcccgcttcccggtgcctttctgtctaggcagggaggcctcaactctggcgatatcgagaccaatcccgggccgagcaagggcgaggaggataacatggccatcatcaaggagttcatgcgcttcaaggtgcacatggagggctccgtgaacggccacgagttcgagatcgagggcgagggcgagggccgcccctacgagggcacccagaccgccaagctgaaggtgaccaagggtggccccctgcccttcgcctgggacatcctgtcccctcagttcatgtacggctccaaggcctacgtgaagcaccccgccgacatccccgactacttgaagctgtccttccccgagggcttcaagtgggagcgcgtgatgaacttcgaggacggcggcgtggtgaccgtgacccaggactcctccctgcaggacggcgagttcatctacaaggtgaagctgcgcggcaccaacttcccctccgacggccccgtaatgcagaagaagaccatgggctgggaggcctcctccgagcggatgtaccccgaggacggcgccctgaagggcgagatcaagcagaggctgaagctgaaggacggcggccactacgacgctgaggtcaagaccacctacaaggccaagaagcccgtgcagctgcccggcgcctacaacgtcaacatcaagttggacatcacctcccacaacgaggactacaccatcgtggaacagtacgaacgcgccgagggccgccactccaccggcggcatggacgagctgtacaaggagggcagaggaagtctgctaacatgcggtgacgtcgaggagaatcccgggcctgcttctgacaacccaattttggagtttcttgaagcagaaaatgatctagtcactctggcctctctctggaagatggtgcactctgttcaacagacctggagaaagtatgtgaagaacgatgatttttggcccaatttactcagcgagctagtgggggaaggctctgtcgccttggccgccacgctatccaaccaagcttcagtaaaggctcttttgggcctgcactttctctctcgggggctcaattacactgacttttactctttactgatagagaaatgctctagtttctttaccgtagaaccacctcctccaccagctgaaaacctgatgaccaagccctcagtgaagtcgaaattccgaaaactgtttaagatgcaaggacccatggacaaagtcaaagactggaaccaaatagctgccggcttgaagaattttcaatttgttcgtgacctagtcaaagaggtggtcgattggctgcaggcctggatcaacaaagagaaagccagccctgtcctccagtaccagttggagatgaagaagctcgggcctgtggccttggctcatgacgctttcatggctggttccgggccccctcttagcgacgaccagattgaatacctccagaacctcaaatctcttgccctaacactggggaagactaatttggcccaaagtctcaccactatgatcaatgccaaacaaagttcagcccaacgagttgaacccgttgtggtggtccttagaggcaagccgggatgcggcaagagcttggcctctacgttgattgcccaggctgtgtccaagcgcctctatggctcccaaagtgtatattctcttcccccagatccagatttcttcgatggatacaaaggacagttcgtgaccttgatggatgatttgggacaaaacccggatggacaagatttctccaccttttgtcagatggtgtcgaccgcccaatttctccccaacatggcggaccttgcagagaaagggcgtccctttacctccaatctcatcattgcaactacaaatctcccccacttcagtcctgtcaccattgctgatccttctgcagtctctcgccgtatcaactacgatctgactctagaagtatctgaggcctacaagaaacacacacggctgaattttgacttggctttcaggcgcacagacgccccccccatttatccttttgctgcccatgtgccctttgtggacgtagctgtgcgcttcaaaaatggtcaccagaattttaatctcctagagttggtcgattccatttgtacagacattcgagccaagcaacaaggtgcccgaaacatgcagactctggttctacagagccccaacgagaatgatgacacccccgtcgacgaggcgttgggtagagttctctcccccgctgcggtcgatgaggcgcttgtcgacctcactccagaggccgacccggttggccgtttggctattcttgccaagctaggtcttgccctagctgcggtcacccctggtctgataatcttggcagtgggactctacaggtacttctctggctctgatgcagaccaagaagaaacagaaagtgagggatctgtcaaggcacccaggagcgaaaatgcttatgacggcccgaagaaaaactctaagccccctggagcactctctctcatggaaatgcaacagcccaacgtggacatgggctttgaggctgcggtcgctaagaaagtggtcgtccccattaccttcatggttcccaacagaccttctgggcttacacagtccgctcttctggtgaccggccggaccttcctaatcaatgaacatacatggtccaatccctcctggaccagcttcacaatccgcggtgaggtacacactcgtgatgagcccttccaaacggttcatttcactcaccacggtattcccacagatctgatgatggtacgtctcggaccgggcaattctttccctaacaatctagacaagtttggacttgaccagatgccggcacgcaactcccgtgtggttggcgtttcgtccagttacggaaacttcttcttctctggaaatttcctcggatttgttgattccatcacctctgaacaaggaacttacgcaagactctttaggtacagggtgacgacctacaaaggatggtgcggctcggccctggtctgtgaggccggtggcgtccgacgcatcattggcctgcattctgctggcgccgccggtatcggcgccgggacctatatctcaaaattaggactaatcaaagccctgaaacacctcggtgaacctttggccacaatgcaaggactgatgactgaattagagcctggaatcaccgtacatgtaccccggaaatccaaattgagaaagacgaccgcacacgcggtgtacaaaccggagtttgagcctgctgtgttgtcaaaatttgatcccagactgaacaaggatgttgacttggatgaagtaatttggtctaaacacactgccaatgtcccttaccaacctcctttgttctacacatacatgtcagagtacgctcatcgagtcttctccttcttggggaaagacaatgacattctgaccgtcaaagaagcaattctgggcatccccggactagaccccatggatccccacacagctccgggtctgccttacgccatcaacggccttcgacgtactgatctcgtcgattttgtgaacggtacagtagatgcggcgctggctgtacaaatccagaaattcttagacggtgactactctgaccatgtcttccaaacttttctgaaagatgagatcagaccctcagagaaagtccgagcgggaaaaacccgcattgttgatgtgccctccctggcgcattgcattgtgggcagaatgttgcttgggcgctttgctgccaagtttcaatcccatcctggctttctcctcggctctgctatcgggtctgaccctgatgttttctggaccgtcataggggctcaactcgaggggagaaagaacacgtatgacgtggactacagtgcctttgactcttcacacggcactggctccttcgaggctctcatctctcactttttcaccgtggacaatggttttagccctgcgctgggaccgtatctcagatccctggctgtctcggtgcacgcttacggcgagcgtcgcatcaagattaccggtggcctcccctccggttgtgccgcgaccagcctgctgaacacagtgctcaacaatgtgatcatcaggactgctctggcattgacttacaaggaatttgaatatgacatggttgatatcatcgcctacggtgacgaccttctggttggcacggattacgatctggacttcaatgaggtggcacgacgcgctgccaagttggggtataagatgactcctgccaacaagggttctgtcttccctccgacttcctctctttccgatgctgtttttctaaagcgcaaattcgtccaaaacaacgacggcttatacaaaccagttatggatttaaagaatttggaagccatgctctcctacttcaaaccaggaacactactcgagaagctgcaatctgtttctatgttggctcaacattctggaaaagaagaatatgatagattgatgcaccccttcgctgactacggtgccgtaccgagtcacgagtacctgcaggcaagatggagggccttgttcgactgacccagatagcccaaggcgcttcggtgctgccggcgattctgggagaactcagtcggaacagaaaagggaaaaaaaaaaaaaaaaaaaaaaaaaaaaaaggccggcatggtcccagcctcctcgctggcgccggctgggcaacatgcttcggcatggcgaatgggacgcggccgctcgagtctagagggcccgtttaaacccgctgatcagcctcgactgtgccttctagttgccagccatctgttgtttgcccctcccccgtgccttccttgaccctggaaggtgccactcccactgtcctttcctaataaaatgaggaaattgcatcgcattgtctgagtaggtgtcattctattctggggggtggggtggggcaggacagcaagggggaggattgggaagacaatagcaggcatgctggggatgcggtgggctctatggtgctggcgtttttccataggctc

SEQ ID NO: 36 - RNA, 5996 nt, Artificial Sequence
  NEP-BV-SVV-mCh Trunc8 RNA
uuugaaauggggggcugggcccugaugcccaguccuuccuuuccccuuccgggggguuaaccggcuguguuugcuagaggcacagaggggcaacauccaaccugcuuuugcggggaacggugcggcuccgauuccugcgucgccaaagguguuagcgcacccaaacggcgcaccuaccaauguuauugguguggucugcgaguucuagccuacucguuucucccccgaccauucacucacccacgaaaaguguguuguaaccauaagauuuaacccccgcacgggaugugcgauaaccguaagacuggcucaagcgcggaaagcgcuguaaccacaugcuguuagucccuuuauggcugcaagauggcuacccaccucggaucacugaacuggagcucgacccuccuuaguaagggaaccgagaggccuucgugcaacaagcuccgacacagaguccacgugacugcuaccaccaugaguacaugguucuccccucucgacccaggacuucuuuuugaauauccacggcucgauccagaggguggggcaugaccccuagcauagcgagcuacagcgggaacuguagcuaggccuuagcgugccuuggauacugccugauagggcgacggccuagucgugucgguucuauagguagcacauacaaauaugcagaacucucauuuuucuuucgauacagccucuggcaccuuugaagauguaaccggaacaaaagucaagaucguugaauaccccagaucggugaacaaugguguuuacgauucgucuacucauuuggagauacugaaccuacagggugaaauugaaauuuuaaggucuuucaaugaauaccaaauucgcgccgccaaacaacaacucggacuggacaucguguacgaacuacaggguaauguucagacaacgucaaagaaugauuuugauucccguggcaauaaugguaacaugaccuucaauuacuacgcaaacacuuaucagaauucaguagacuucucgaccuccucgucggcgucaggcgccggaccugggaacucucggggcggauuagcgggucuccucacaaauuucaguggaaucuugaacccucuuggcuaccucaaagaucacaacaccgaagaaauggaaaacucugcugaucgagucacaacgcaaacggcgggcaacacugccauaaacacgcaaucaucauuggguguguugugugccuacguugaagacccgaccaaaucugauccuccguccagcagcacagaucaacccaccaccacuuucacugccaucgacaggugguacacuggacgucucaauucuuggacaaaagcuguaaaaaccuucucuuuucaggccgucccgcuucccggugccuuucugucuaggcagggaggccucaacucuggcgauaucgagaccaaucccgggccgagcaagggcgaggaggauaacauggccaucaucaaggaguucaugcgcuucaaggugcacauggagggcuccgugaacggccacgaguucgagaucgagggcgagggcgagggccgccccuacgagggcacccagaccgccaagcugaaggugaccaaggguggcccccugcccuucgccugggacauccuguccccucaguucauguacggcuccaaggccuacgugaagcaccccgccgacauccccgacuacuugaagcuguccuuccccgagggcuucaagugggagcgcgugaugaacuucgaggacggcggcguggugaccgugacccaggacuccucccugcaggacggcgaguucaucuacaaggugaagcugcgcggcaccaacuuccccuccgacggccccguaaugcagaagaagaccaugggcugggaggccuccuccgagcggauguaccccgaggacggcgcccugaagggcgagaucaagcagaggcugaagcugaaggacggcggccacuacgacgcugaggucaagaccaccuacaaggccaagaagcccgugcagcugcccggcgccuacaacgucaacaucaaguuggacaucaccucccacaacgaggacuacaccaucguggaacaguacgaacgcgccgagggccgccacuccaccggcggcauggacgagcuguacaaggagggcagaggaagucugcuaacaugcggugacgucgaggagaaucccgggccugcuucugacaacccaauuuuggaguuucuugaagcagaaaaugaucuagucacucuggccucucucuggaagauggugcacucuguucaacagaccuggagaaaguaugugaagaacgaugauuuuuggcccaauuuacucagcgagcuagugggggaaggcucugucgccuuggccgccacgcuauccaaccaagcuucaguaaaggcucuuuugggccugcacuuucucucucgggggcucaauuacacugacuuuuacucuuuacugauagagaaaugcucuaguuucuuuaccguagaaccaccuccuccaccagcugaaaaccugaugaccaagcccucagugaagucgaaauuccgaaaacuguuuaagaugcaaggacccauggacaaagucaaagacuggaaccaaauagcugccggcuugaagaauuuucaauuuguucgugaccuagucaaagagguggucgauuggcugcaggccuggaucaacaaagagaaagccagcccuguccuccaguaccaguuggagaugaagaagcucgggccuguggccuuggcucaugacgcuuucauggcugguuccgggcccccucuuagcgacgaccagauugaauaccuccagaaccucaaaucucuugcccuaacacuggggaagacuaauuuggcccaaagucucaccacuaugaucaaugccaaacaaaguucagcccaacgaguugaacccguuguggugguccuuagaggcaagccgggaugcggcaagagcuuggccucuacguugauugcccaggcuguguccaagcgccucuauggcucccaaaguguauauucucuucccccagauccagauuucuucgauggauacaaaggacaguucgugaccuugauggaugauuugggacaaaacccggauggacaagauuucuccaccuuuugucagauggugucgaccgcccaauuucuccccaacauggcggaccuugcagagaaagggcgucccuuuaccuccaaucucaucauugcaacuacaaaucucccccacuucaguccugucaccauugcugauccuucugcagucucucgccguaucaacuacgaucugacucuagaaguaucugaggccuacaagaaacacacacggcugaauuuugacuuggcuuucaggcgcacagacgccccccccauuuauccuuuugcugcccaugugcccuuuguggacguagcugugcgcuucaaaaauggucaccagaauuuuaaucuccuagaguuggucgauuccauuuguacagacauucgagccaagcaacaaggugcccgaaacaugcagacucugguucuacagagccccaacgagaaugaugacacccccgucgacgaggcguuggguagaguucucucccccgcugcggucgaugaggcgcuugucgaccucacuccagaggccgacccgguuggccguuuggcuauucuugccaagcuaggucuugcccuagcugcggucaccccuggucugauaaucuuggcagugggacucuacagguacuucucuggcucugaugcagaccaagaagaaacagaaagugagggaucugucaaggcacccaggagcgaaaaugcuuaugacggcccgaagaaaaacucuaagcccccuggagcacucucucucauggaaaugcaacagcccaacguggacaugggcuuugaggcugcggucgcuaagaaaguggucguccccauuaccuucaugguucccaacagaccuucugggcuuacacaguccgcucuucuggugaccggccggaccuuccuaaucaaugaacauacaugguccaaucccuccuggaccagcuucacaauccgcggugagguacacacucgugaugagcccuuccaaacgguucauuucacucaccacgguauucccacagaucugaugaugguacgucucggaccgggcaauucuuucccuaacaaucuagacaaguuuggacuugaccagaugccggcacgcaacucccgugugguuggcguuucguccaguuacggaaacuucuucuucucuggaaauuuccucggauuuguugauuccaucaccucugaacaaggaacuuacgcaagacucuuuagguacagggugacgaccuacaaaggauggugcggcucggcccuggucugugaggccgguggcguccgacgcaucauuggccugcauucugcuggcgccgccgguaucggcgccgggaccuauaucucaaaauuaggacuaaucaaagcccugaaacaccucggugaaccuuuggccacaaugcaaggacugaugacugaauuagagccuggaaucaccguacauguaccccggaaauccaaauugagaaagacgaccgcacacgcgguguacaaaccggaguuugagccugcuguguugucaaaauuugaucccagacugaacaaggauguugacuuggaugaaguaauuuggucuaaacacacugccaaugucccuuaccaaccuccuuuguucuacacauacaugucagaguacgcucaucgagucuucuccuucuuggggaaagacaaugacauucugaccgucaaagaagcaauucugggcauccccggacuagaccccauggauccccacacagcuccgggucugccuuacgccaucaacggccuucgacguacugaucucgucgauuuugugaacgguacaguagaugcggcgcuggcuguacaaauccagaaauucuuagacggugacuacucugaccaugucuuccaaacuuuucugaaagaugagaucagacccucagagaaaguccgagcgggaaaaacccgcauuguugaugugcccucccuggcgcauugcauugugggcagaauguugcuugggcgcuuugcugccaaguuucaaucccauccuggcuuucuccucggcucugcuaucgggucugacccugauguuuucuggaccgucauaggggcucaacucgaggggagaaagaacacguaugacguggacuacagugccuuugacucuucacacggcacuggcuccuucgaggcucucaucucucacuuuuucaccguggacaaugguuuuagcccugcgcugggaccguaucucagaucccuggcugucucggugcacgcuuacggcgagcgucgcaucaagauuaccgguggccuccccuccgguugugccgcgaccagccugcugaacacagugcucaacaaugugaucaucaggacugcucuggcauugacuuacaaggaauuugaauaugacaugguugauaucaucgccuacggugacgaccuucugguuggcacggauuacgaucuggacuucaaugagguggcacgacgcgcugccaaguugggguauaagaugacuccugccaacaaggguucugucuucccuccgacuuccucucuuuccgaugcuguuuuucuaaagcgcaaauucguccaaaacaacgacggcuuauacaaaccaguuauggauuuaaagaauuuggaagccaugcucuccuacuucaaaccaggaacacuacucgagaagcugcaaucuguuucuauguuggcucaacauucuggaaaagaagaauaugauagauugaugcaccccuucgcugacuacggugccguaccgagucacgaguaccugcaggcaagauggagggccuuguucgacugacccagauagcccaaggcgcuucggugcugccggcgauucugggagaacucagucggaacagaaaagggaaaaaaaaaaaaaaaaaaaaaaaaaaaaaa

SEQ ID NO: 37 - DNA, 8404 bp, Artificial Sequence
  NEP-BV-SVV-mCh Trunc10
cgcccccctgacgagcatcacaaaaatcgacgctcaagtcagaggtggcgaaacccgacaggactataaagataccaggcgtttccccctggaagctccctcgtgcgctctcctgttccgaccctgccgcttaccggatacctgtccgcctttctcccttcgggaagcgtggcgctttctcatagctcacgctgtaggtatctcagttcggtgtaggtcgttcgctccaagctgggctgtgtgcacgaaccccccgttcagcccgaccgctgcgccttatccggtaactatcgtcttgagtccaacccggtaagacacgacttatcgccactggcagcagccactggtaacaggattagcagagcgaggtatgtaggcggtgctacagagttcttgaagtggtggcctaactacggctacactagaagaacagtatttggtatctgcgctctgctgaagccagttaccttcggaaaaagagttggtagctcttgatccggcaaacaaaccaccgctggtagcggtggtttttttgtttgcaagcagcagattacgcgcagaaaaaaaggatctcaagaagatccttttaaaaaaattcatccaacaaacgataaaatgcaatacgttgactatctggtgctgcaataccatataaaactaaaaaacgatctgcccattcaccacctaattcttctgcaatatcacgagttgctaatgcaatatcttgataacgatctgcaacacctaaacgaccacaatcaatgaaaccactaaaacgaccattttcaaccataatatttggtaaacatgcatcaccatgagtaacaactaaatcttcaccatctggcatacttgcttttaaacgtgcaaacaattctgctggtgctaaaccttgatgttcttcatctaaatcatcttgatcaactaaacctgcttccatacgagtacgtgcacgttcaatacgatgttttgcttgatgatcaaatggacaagttgctggatctaaagtatgtaaacgacgcattgcatctgccataatactaactttttctgctggtgctaaatgactagataacaaatcttgacctggaacttcacctaacaacaaccaatcacgacctgcttcagtaacaacatctaaaactgctgcacatggaacaccagtagttgctaaccaacttaaacgtgctgcttcatcttgtaattcatttaatgcaccacttaaatcagttttaacaaacaaaactggacgaccttgtgcacttaaacgaaaaactgctgcatcagaacaaccaatagtttgttgtgcccaatcataaccaaacaaacgttcaacccatgctgctggactacctgcatgtaaaccatcttgttcaatcatactcttcctttttcaatattattgaagcatttatcagggttattgtctcatgagcggatacatatttgaagaattcacattgattattgactagttattaatagtaatcaattacggggtcattagttcatagcccatatatggagttccgcgttacataacttacggtaaatggcccgcctggctgaccgcccaacgacccccgcccattgacgtcaataatgacgtatgttcccatagtaacgccaatagggactttccattgacgtcaatgggtggagtatttacggtaaactgcccacttggcagtacatcaagtgtatcatatgccaagtacgccccctattgacgtcaatgacggtaaatggcccgcctggcattatgcccagtacatgaccttatgggactttcctacttggcagtacatctacgtattagtcatcgctattaccatggtgatgcggttttggcagtacatcaatgggcgtggatagcggtttgactcacggggatttccaagtctccaccccattgacgtcaatgggagtttgttttggcaccaaaatcaacgggactttccaaaatgtcgtaacaactccgccccattgacgcaaatgggcggtaggcgtgtacggtgggaggtctatataagcagagctctctggctaactagagaacccactgcttactggcttatcgaaattaatacgactcactatagggagacccaagctggctagcgtttaaacttaagcttggtaccttatcaaactgatgagtccgtgaggacgaaacgagtaagctcgtctttgaaatggggggctgggccctgatgcccagtccttcctttccccttccggggggttaaccggctgtgtttgctagaggcacagaggggcaacatccaacctgcttttgcggggaacggtgcggctccgattcctgcgtcgccaaaggtgttagcgcacccaaacggcgcacctaccaatgttattggtgtggtctgcgagttctagcctactcgtttctcccccgaccattcactcacccacgaaaagtgtgttgtaaccataagatttaacccccgcacgggatgtgcgataaccgtaagactggctcaagcgcggaaagcgctgtaaccacatgctgttagtccctttatggctgcaagatggctacccacctcggatcactgaactggagctcgaccctccttagtaagggaaccgagaggccttcgtgcaacaagctccgacacagagtccacgtgactgctaccaccatgagtacatggttctcccctctcgacccaggacttctttttgaatatccacggctcgatccagagggtggggcatgacccctagcatagcgagctacagcgggaactgtagctaggccttagcgtgccttggatactgcctgatagggcgacggcctagtcgtgtcggttctataggtagcacatacaaatatgcagaactctcatttttctttcgatacagcctctggcacctttgaagatgtaaccggaacaaaagtcaagatcgttgaataccccagatcggtgaacaatggtgtttacgattcgtctactcatttggagatactgaacctacagggtgaaattgaaattttaaggtctttcaatgaataccaaattcgcgccgccaaacaacaactcggactggacatcgtgtacgaactacagggtaatgttcagacaacgtcaaagaatgattttgattcccgtggcaataatggtaacatgaccttcaattactacgcaaacacttatcagaattcagtagacttctcgacctcctcgtcggcgtcaggcgccggacctgggaactctcggggcggattagcgggtctcctcacaaatttcagtggaatcttgaaccctcttggctacctcaaagatcacaacaccgaagaaatggaaaactctgctgatcgagtcacaacgcaaacggcgggcaacactgccataaacacgcaatcatcattgggtgtgttgtgtgcctacgttgaagacccgaccaaatctgatcctccgtccagctctggcgatatcgagaccaatcccgggccgagcaagggcgaggaggataacatggccatcatcaaggagttcatgcgcttcaaggtgcacatggagggctccgtgaacggccacgagttcgagatcgagggcgagggcgagggccgcccctacgagggcacccagaccgccaagctgaaggtgaccaagggtggccccctgcccttcgcctgggacatcctgtcccctcagttcatgtacggctccaaggcctacgtgaagcaccccgccgacatccccgactacttgaagctgtccttccccgagggcttcaagtgggagcgcgtgatgaacttcgaggacggcggcgtggtgaccgtgacccaggactcctccctgcaggacggcgagttcatctacaaggtgaagctgcgcggcaccaacttcccctccgacggccccgtaatgcagaagaagaccatgggctgggaggcctcctccgagcggatgtaccccgaggacggcgccctgaagggcgagatcaagcagaggctgaagctgaaggacggcggccactacgacgctgaggtcaagaccacctacaaggccaagaagcccgtgcagctgcccggcgcctacaacgtcaacatcaagttggacatcacctcccacaacgaggactacaccatcgtggaacagtacgaacgcgccgagggccgccactccaccggcggcatggacgagctgtacaaggagggcagaggaagtctgctaacatgcggtgacgtcgaggagaatcccgggcctgcttctgacaacccaattttggagtttcttgaagcagaaaatgatctagtcactctggcctctctctggaagatggtgcactctgttcaacagacctggagaaagtatgtgaagaacgatgatttttggcccaatttactcagcgagctagtgggggaaggctctgtcgccttggccgccacgctatccaaccaagcttcagtaaaggctcttttgggcctgcactttctctctcgggggctcaattacactgacttttactctttactgatagagaaatgctctagtttctttaccgtagaaccacctcctccaccagctgaaaacctgatgaccaagccctcagtgaagtcgaaattccgaaaactgtttaagatgcaaggacccatggacaaagtcaaagactggaaccaaatagctgccggcttgaagaattttcaatttgttcgtgacctagtcaaagaggtggtcgattggctgcaggcctggatcaacaaagagaaagccagccctgtcctccagtaccagttggagatgaagaagctcgggcctgtggccttggctcatgacgctttcatggctggttccgggccccctcttagcgacgaccagattgaatacctccagaacctcaaatctcttgccctaacactggggaagactaatttggcccaaagtctcaccactatgatcaatgccaaacaaagttcagcccaacgagttgaacccgttgtggtggtccttagaggcaagccgggatgcggcaagagcttggcctctacgttgattgcccaggctgtgtccaagcgcctctatggctcccaaagtgtatattctcttcccccagatccagatttcttcgatggatacaaaggacagttcgtgaccttgatggatgatttgggacaaaacccggatggacaagatttctccaccttttgtcagatggtgtcgaccgcccaatttctccccaacatggcggaccttgcagagaaagggcgtccctttacctccaatctcatcattgcaactacaaatctcccccacttcagtcctgtcaccattgctgatccttctgcagtctctcgccgtatcaactacgatctgactctagaagtatctgaggcctacaagaaacacacacggctgaattttgacttggctttcaggcgcacagacgccccccccatttatccttttgctgcccatgtgccctttgtggacgtagctgtgcgcttcaaaaatggtcaccagaattttaatctcctagagttggtcgattccatttgtacagacattcgagccaagcaacaaggtgcccgaaacatgcagactctggttctacagagccccaacgagaatgatgacacccccgtcgacgaggcgttgggtagagttctctcccccgctgcggtcgatgaggcgcttgtcgacctcactccagaggccgacccggttggccgtttggctattcttgccaagctaggtcttgccctagctgcggtcacccctggtctgataatcttggcagtgggactctacaggtacttctctggctctgatgcagaccaagaagaaacagaaagtgagggatctgtcaaggcacccaggagcgaaaatgcttatgacggcccgaagaaaaactctaagccccctggagcactctctctcatggaaatgcaacagcccaacgtggacatgggctttgaggctgcggtcgctaagaaagtggtcgtccccattaccttcatggttcccaacagaccttctgggcttacacagtccgctcttctggtgaccggccggaccttcctaatcaatgaacatacatggtccaatccctcctggaccagcttcacaatccgcggtgaggtacacactcgtgatgagcccttccaaacggttcatttcactcaccacggtattcccacagatctgatgatggtacgtctcggaccgggcaattctttccctaacaatctagacaagtttggacttgaccagatgccggcacgcaactcccgtgtggttggcgtttcgtccagttacggaaacttcttcttctctggaaatttcctcggatttgttgattccatcacctctgaacaaggaacttacgcaagactctttaggtacagggtgacgacctacaaaggatggtgcggctcggccctggtctgtgaggccggtggcgtccgacgcatcattggcctgcattctgctggcgccgccggtatcggcgccgggacctatatctcaaaattaggactaatcaaagccctgaaacacctcggtgaacctttggccacaatgcaaggactgatgactgaattagagcctggaatcaccgtacatgtaccccggaaatccaaattgagaaagacgaccgcacacgcggtgtacaaaccggagtttgagcctgctgtgttgtcaaaatttgatcccagactgaacaaggatgttgacttggatgaagtaatttggtctaaacacactgccaatgtcccttaccaacctcctttgttctacacatacatgtcagagtacgctcatcgagtcttctccttcttggggaaagacaatgacattctgaccgtcaaagaagcaattctgggcatccccggactagaccccatggatccccacacagctccgggtctgccttacgccatcaacggccttcgacgtactgatctcgtcgattttgtgaacggtacagtagatgcggcgctggctgtacaaatccagaaattcttagacggtgactactctgaccatgtcttccaaacttttctgaaagatgagatcagaccctcagagaaagtccgagcgggaaaaacccgcattgttgatgtgccctccctggcgcattgcattgtgggcagaatgttgcttgggcgctttgctgccaagtttcaatcccatcctggctttctcctcggctctgctatcgggtctgaccctgatgttttctggaccgtcataggggctcaactcgaggggagaaagaacacgtatgacgtggactacagtgcctttgactcttcacacggcactggctccttcgaggctctcatctctcactttttcaccgtggacaatggttttagccctgcgctgggaccgtatctcagatccctggctgtctcggtgcacgcttacggcgagcgtcgcatcaagattaccggtggcctcccctccggttgtgccgcgaccagcctgctgaacacagtgctcaacaatgtgatcatcaggactgctctggcattgacttacaaggaatttgaatatgacatggttgatatcatcgcctacggtgacgaccttctggttggcacggattacgatctggacttcaatgaggtggcacgacgcgctgccaagttggggtataagatgactcctgccaacaagggttctgtcttccctccgacttcctctctttccgatgctgtttttctaaagcgcaaattcgtccaaaacaacgacggcttatacaaaccagttatggatttaaagaatttggaagccatgctctcctacttcaaaccaggaacactactcgagaagctgcaatctgtttctatgttggctcaacattctggaaaagaagaatatgatagattgatgcaccccttcgctgactacggtgccgtaccgagtcacgagtacctgcaggcaagatggagggccttgttcgactgacccagatagcccaaggcgcttcggtgctgccggcgattctgggagaactcagtcggaacagaaaagggaaaaaaaaaaaaaaaaaaaaaaaaaaaaaaggccggcatggtcccagcctcctcgctggcgccggctgggcaacatgcttcggcatggcgaatgggacgcggccgctcgagtctagagggcccgtttaaacccgctgatcagcctcgactgtgccttctagttgccagccatctgttgtttgcccctcccccgtgccttccttgaccctggaaggtgccactcccactgtcctttcctaataaaatgaggaaattgcatcgcattgtctgagtaggtgtcattctattctggggggtggggtggggcaggacagcaagggggaggattgggaagacaatagcaggcatgctggggatgcggtgggctctatggtgctggcgtttttccataggctc

SEQ ID NO: 38 - RNA, 5849 nt, Artificial Sequence
  NEP-BV-SVV-mCh Trunc10 RNA
uuugaaauggggggcugggcccugaugcccaguccuuccuuuccccuuccgggggguuaaccggcuguguuugcuagaggcacagaggggcaacauccaaccugcuuuugcggggaacggugcggcuccgauuccugcgucgccaaagguguuagcgcacccaaacggcgcaccuaccaauguuauugguguggucugcgaguucuagccuacucguuucucccccgaccauucacucacccacgaaaaguguguuguaaccauaagauuuaacccccgcacgggaugugcgauaaccguaagacuggcucaagcgcggaaagcgcuguaaccacaugcuguuagucccuuuauggcugcaagauggcuacccaccucggaucacugaacuggagcucgacccuccuuaguaagggaaccgagaggccuucgugcaacaagcuccgacacagaguccacgugacugcuaccaccaugaguacaugguucuccccucucgacccaggacuucuuuuugaauauccacggcucgauccagaggguggggcaugaccccuagcauagcgagcuacagcgggaacuguagcuaggccuuagcgugccuuggauacugccugauagggcgacggccuagucgugucgguucuauagguagcacauacaaauaugcagaacucucauuuuucuuucgauacagccucuggcaccuuugaagauguaaccggaacaaaagucaagaucguugaauaccccagaucggugaacaaugguguuuacgauucgucuacucauuuggagauacugaaccuacagggugaaauugaaauuuuaaggucuuucaaugaauaccaaauucgcgccgccaaacaacaacucggacuggacaucguguacgaacuacaggguaauguucagacaacgucaaagaaugauuuugauucccguggcaauaaugguaacaugaccuucaauuacuacgcaaacacuuaucagaauucaguagacuucucgaccuccucgucggcgucaggcgccggaccugggaacucucggggcggauuagcgggucuccucacaaauuucaguggaaucuugaacccucuuggcuaccucaaagaucacaacaccgaagaaauggaaaacucugcugaucgagucacaacgcaaacggcgggcaacacugccauaaacacgcaaucaucauuggguguguugugugccuacguugaagacccgaccaaaucugauccuccguccagcucuggcgauaucgagaccaaucccgggccgagcaagggcgaggaggauaacauggccaucaucaaggaguucaugcgcuucaaggugcacauggagggcuccgugaacggccacgaguucgagaucgagggcgagggcgagggccgccccuacgagggcacccagaccgccaagcugaaggugaccaaggguggcccccugcccuucgccugggacauccuguccccucaguucauguacggcuccaaggccuacgugaagcaccccgccgacauccccgacuacuugaagcuguccuuccccgagggcuucaagugggagcgcgugaugaacuucgaggacggcggcguggugaccgugacccaggacuccucccugcaggacggcgaguucaucuacaaggugaagcugcgcggcaccaacuuccccuccgacggccccguaaugcagaagaagaccaugggcugggaggccuccuccgagcggauguaccccgaggacggcgcccugaagggcgagaucaagcagaggcugaagcugaaggacggcggccacuacgacgcugaggucaagaccaccuacaaggccaagaagcccgugcagcugcccggcgccuacaacgucaacaucaaguuggacaucaccucccacaacgaggacuacaccaucguggaacaguacgaacgcgccgagggccgccacuccaccggcggcauggacgagcuguacaaggagggcagaggaagucugcuaacaugcggugacgucgaggagaaucccgggccugcuucugacaacccaauuuuggaguuucuugaagcagaaaaugaucuagucacucuggccucucucuggaagauggugcacucuguucaacagaccuggagaaaguaugugaagaacgaugauuuuuggcccaauuuacucagcgagcuagugggggaaggcucugucgccuuggccgccacgcuauccaaccaagcuucaguaaaggcucuuuugggccugcacuuucucucucgggggcucaauuacacugacuuuuacucuuuacugauagagaaaugcucuaguuucuuuaccguagaaccaccuccuccaccagcugaaaaccugaugaccaagcccucagugaagucgaaauuccgaaaacuguuuaagaugcaaggacccauggacaaagucaaagacuggaaccaaauagcugccggcuugaagaauuuucaauuuguucgugaccuagucaaagagguggucgauuggcugcaggccuggaucaacaaagagaaagccagcccuguccuccaguaccaguuggagaugaagaagcucgggccuguggccuuggcucaugacgcuuucauggcugguuccgggcccccucuuagcgacgaccagauugaauaccuccagaaccucaaaucucuugcccuaacacuggggaagacuaauuuggcccaaagucucaccacuaugaucaaugccaaacaaaguucagcccaacgaguugaacccguuguggugguccuuagaggcaagccgggaugcggcaagagcuuggccucuacguugauugcccaggcuguguccaagcgccucuauggcucccaaaguguauauucucuucccccagauccagauuucuucgauggauacaaaggacaguucgugaccuugauggaugauuugggacaaaacccggauggacaagauuucuccaccuuuugucagauggugucgaccgcccaauuucuccccaacauggcggaccuugcagagaaagggcgucccuuuaccuccaaucucaucauugcaacuacaaaucucccccacuucaguccugucaccauugcugauccuucugcagucucucgccguaucaacuacgaucugacucuagaaguaucugaggccuacaagaaacacacacggcugaauuuugacuuggcuuucaggcgcacagacgccccccccauuuauccuuuugcugcccaugugcccuuuguggacguagcugugcgcuucaaaaauggucaccagaauuuuaaucuccuagaguuggucgauuccauuuguacagacauucgagccaagcaacaaggugcccgaaacaugcagacucugguucuacagagccccaacgagaaugaugacacccccgucgacgaggcguuggguagaguucucucccccgcugcggucgaugaggcgcuugucgaccucacuccagaggccgacccgguuggccguuuggcuauucuugccaagcuaggucuugcccuagcugcggucaccccuggucugauaaucuuggcagugggacucuacagguacuucucuggcucugaugcagaccaagaagaaacagaaagugagggaucugucaaggcacccaggagcgaaaaugcuuaugacggcccgaagaaaaacucuaagcccccuggagcacucucucucauggaaaugcaacagcccaacguggacaugggcuuugaggcugcggucgcuaagaaaguggucguccccauuaccuucaugguucccaacagaccuucugggcuuacacaguccgcucuucuggugaccggccggaccuuccuaaucaaugaacauacaugguccaaucccuccuggaccagcuucacaauccgcggugagguacacacucgugaugagcccuuccaaacgguucauuucacucaccacgguauucccacagaucugaugaugguacgucucggaccgggcaauucuuucccuaacaaucuagacaaguuuggacuugaccagaugccggcacgcaacucccgugugguuggcguuucguccaguuacggaaacuucuucuucucuggaaauuuccucggauuuguugauuccaucaccucugaacaaggaacuuacgcaagacucuuuagguacagggugacgaccuacaaaggauggugcggcucggcccuggucugugaggccgguggcguccgacgcaucauuggccugcauucugcuggcgccgccgguaucggcgccgggaccuauaucucaaaauuaggacuaaucaaagcccugaaacaccucggugaaccuuuggccacaaugcaaggacugaugacugaauuagagccuggaaucaccguacauguaccccggaaauccaaauugagaaagacgaccgcacacgcgguguacaaaccggaguuugagccugcuguguugucaaaauuugaucccagacugaacaaggauguugacuuggaugaaguaauuuggucuaaacacacugccaaugucccuuaccaaccuccuuuguucuacacauacaugucagaguacgcucaucgagucuucuccuucuuggggaaagacaaugacauucugaccgucaaagaagcaauucugggcauccccggacuagaccccauggauccccacacagcuccgggucugccuuacgccaucaacggccuucgacguacugaucucgucgauuuugugaacgguacaguagaugcggcgcuggcuguacaaauccagaaauucuuagacggugacuacucugaccaugucuuccaaacuuuucugaaagaugagaucagacccucagagaaaguccgagcgggaaaaacccgcauuguugaugugcccucccuggcgcauugcauugugggcagaauguugcuugggcgcuuugcugccaaguuucaaucccauccuggcuuucuccucggcucugcuaucgggucugacccugauguuuucuggaccgucauaggggcucaacucgaggggagaaagaacacguaugacguggacuacagugccuuugacucuucacacggcacuggcuccuucgaggcucucaucucucacuuuuucaccguggacaaugguuuuagcccugcgcugggaccguaucucagaucccuggcugucucggugcacgcuuacggcgagcgucgcaucaagauuaccgguggccuccccuccgguugugccgcgaccagccugcugaacacagugcucaacaaugugaucaucaggacugcucuggcauugacuuacaaggaauuugaauaugacaugguugauaucaucgccuacggugacgaccuucugguuggcacggauuacgaucuggacuucaaugagguggcacgacgcgcugccaaguugggguauaagaugacuccugccaacaaggguucugucuucccuccgacuuccucucuuuccgaugcuguuuuucuaaagcgcaaauucguccaaaacaacgacggcuuauacaaaccaguuauggauuuaaagaauuuggaagccaugcucuccuacuucaaaccaggaacacuacucgagaagcugcaaucuguuucuauguuggcucaacauucuggaaaagaagaauaugauagauugaugcaccccuucgcugacuacggugccguaccgagucacgaguaccugcaggcaagauggagggccuuguucgacugacccagauagcccaaggcgcuucggugcugccggcgauucugggagaacucagucggaacagaaaagggaaaaaaaaaaaaaaaaaaaaaaaaaaaaaa

SEQ ID NO: 39 - DNA, 10263 bp, Artificial Sequence
  pJJViper-mFAP-BiTE-3C-mCXCL10
ctgacggatggcctttttgcgtttctacaaactcttcctgttagttagttacttaagctcgggccccaaataatgattttattttgactgatagtgacctgttcgttgcaacaaattgataagcaatgcttttttataatgccaacattgattattgactagttattaatagtaatcaattacggggtcattagttcatagcccatatatggagttccgcgttacataacttacggtaaatggcccgcctggctgaccgcccaacgacccccgcccattgacgtcaataatgacgtatgttcccatagtaacgccaatagggactttccattgacgtcaatgggtggagtatttacggtaaactgcccacttggcagtacatcaagtgtatcatatgccaagtacgccccctattgacgtcaatgacggtaaatggcccgcctggcattatgcccagtacatgaccttatgggactttcctacttggcagtacatctacgtattagtcatcgctattaccatggtgatgcggttttggcagtacatcaatgggcgtggatagcggtttgactcacggggatttccaagtctccaccccattgacgtcaatgggagtttgttttggcaccaaaatcaacgggactttccaaaatgtcgtaacaactccgccccattgacgcaaatgggcggtaggcgtgtacggtgggaggtctatataagcagagctctctggctaactagagaacccactgcttactggcttatcgaaattaatacgactcactatagggagacccaagctggctagcgtttaaacttaagcttggtaccttatcaaactgatgagtccgtgaggacgaaacgagtaagctcgtctttgaaatggggggctgggccctgatgcccagtccttcctttccccttccggggggttaaccggctgtgtttgctagaggcacagaggggcaacatccaacctgcttttgcggggaacggtgcggctccgattcctgcgtcgccaaaggtgttagcgcacccaaacggcgcacctaccaatgttattggtgtggtctgcgagttctagcctactcgtttctcccccgaccattcactcacccacgaaaagtgtgttgtaaccataagatttaacccccgcacgggatgtgcgataaccgtaagactggctcaagcgcggaaagcgctgtaaccacatgctgttagtccctttatggctgcaagatggctacccacctcggatcactgaactggagctcgaccctccttagtaagggaaccgagaggccttcgtgcaacaagctccgacacagagtccacgtgactgctaccaccatgagtacatggttctcccctctcgacccaggacttctttttgaatatccacggctcgatccagagggtggggcatgacccctagcatagcgagctacagcgggaactgtagctaggccttagcgtgccttggatactgcctgatagggcgacggcctagtcgtgtcggttctataggtagcacatacaaatatgcagaactctcatttttctttcgatacagcctctggcacctttgaagatgtaaccggaacaaaagtcaagatcgttgaataccccagatcggtgaacaatggtgtttacgattcgtctactcatttggagatactgaacctacagggtgaaattgaaattttaaggtctttcaatgaataccaaattcgcgccgccaaacaacaactcggactggacatcgtgtacgaactacagggtaatgttcagacaacgtcaaagaatgattttgattcccgtggcaataatggtaacatgaccttcaattactacgcaaacacttatcagaattcagtagacttctcgacctcctcgtcggcgtcaggcgccggacctgggaactctcggggcggattagcgggtctcctcacaaatttcagtggaatcttgaaccctcttggctacctcaaagatcacaacaccgaagaaatggaaaactctgctgatcgagtcacaacgcaaacggcgggcaacactgccataaacacgcaatcatcattgggtgtgttgtgtgcctacgttgaagacccgaccaaatctgatcctccgtccagctctggcgatatcgagaccaatcccgggccgatgtacaggatgcaactcctgtcttgcattgcactaagtcttgcacttgtcacgaattcacaggtgcagctccagcagagtggcgcagagctcgctcgcccaggcgcttctgtgaatctgagttgtaaggcctccggatatacttttacgaacaacggcatcaactggctgaagcagcggaccggccagggcctggagtggatcggcgaaatatacccccggtccacaaacactctctataacgagaagtttaagggcaaagcaactctgaccgcggacaggtcctctaacacagcctatatggagctgagaagcttgacgagtgaggactccgctgtctatttttgcgcccgaactctgaccgctccttttgctttttggggccagggcacgctcgtgaccgtaagtgcgggctccactagcggttccggcaaacctggcagcggagaaggcagcaccaaagggcagatcgtcctgacgcagtctccagccatcatgagcgcctcacccggcgaaaaggtgaccatgacctgctcagcctcttctggtgtgaatttcatgcactggtaccagcaaaaaagtgggacctcccctaaaaggtggatcttcgataccagcaaactggcttctggcgttcccgcaaggtttagcggctctggttccggcacatcatacagcctgacgatcagcagcatggaggcagaagacgcagctacctattactgccagcaatggagctttaacccacctactttcggaggaggaacaaagctggaaataaaaagaggtggtggtggatcagaggtgcagctggtggagtctgggggaggcttggtgcagcctggaaagtccctgaaactctcctgtgaggcctctggattcaccttcagcggctatggcatgcactgggtccgccaggctccagggagggggctggagtcggtcgcatacattactagtagtagtattaatatcaaatatgctgacgctgtgaaaggccggttcaccgtctccagagacaatgccaagaacttactgtttctacaaatgaacattctcaagtctgaggacacagccatgtactactgtgcaagattcgactgggacaaaaattactggggccaaggaaccatggtcaccgtctcctcaggtggtggtggatcaggtggaggcggaagtggaggtggcggatccgacatccagatgacccagtctccatcatcactgcctgcctccctgggagacagagtcactatcaattgtcaggccagtcaggacattagcaattatttaaactggtaccagcagaaaccagggaaagctcctaagctcctgatctattatacaaataaattggcagatggagtcccatcaaggttcagtggcagtggttctgggagagattcttctttcactatcagcagcctggaatccgaagatattggatcttattactgtcaacagtattataactatccgtggacgttcggacctggcaccaagctggaaatcaaacggcaccaccatcatcaccacatcgtgtacgaactacagggtcccatgaacccaagtgctgccgtcattttctgcctcatcctgctgggtctgagtgggactcaagggatccctctcgcaaggacggtccgctgcaactgcatccatatcgatgacgggccagtgagaatgagggccatagggaagcttgaaatcatccctgcgagcctatcctgcccacgtgttgagatcattgccacgatgaaaaagaatgatgagcagagatgtctgaatccggaatctaagaccatcaagaatttaatgaaagcgtttagccaaaaaaggtctaaaagggctcctgagggcagaggaagtctgctaacatgcggtgacgtcgaggagaatcccgggcctgcttctgacaacccaattttggagtttcttgaagcagaaaatgatctagtcactctggcctctctctggaagatggtgcactctgttcaacagacctggagaaagtatgtgaagaacgatgatttttggcccaatttactcagcgagctagtgggggaaggctctgtcgccttggccgccacgctatccaaccaagcttcagtaaaggctcttttgggcctgcactttctctctcgggggctcaattacactgacttttactctttactgatagagaaatgctctagtttctttaccgtagaaccacctcctccaccagctgaaaacctgatgaccaagccctcagtgaagtcgaaattccgaaaactgtttaagatgcaaggacccatggacaaagtcaaagactggaaccaaatagctgccggcttgaagaattttcaatttgttcgtgacctagtcaaagaggtggtcgattggctgcaggcctggatcaacaaagagaaagccagccctgtcctccagtaccagttggagatgaagaagctcgggcctgtggccttggctcatgacgctttcatggctggttccgggccccctcttagcgacgaccagattgaatacctccagaacctcaaatctcttgccctaacactggggaagactaatttggcccaaagtctcaccactatgatcaatgccaaacaaagttcagcccaacgagttgaacccgttgtggtggtccttagaggcaagccgggatgcggcaagagcttggcctctacgttgattgcccaggctgtgtccaagcgcctctatggctcccaaagtgtatattctcttcccccagatccagatttcttcgatggatacaaaggacagttcgtgaccttgatggatgatttgggacaaaacccggatggacaagatttctccaccttttgtcagatggtgtcgaccgcccaatttctccccaacatggcggaccttgcagagaaagggcgtccctttacctccaatctcatcattgcaactacaaatctcccccacttcagtcctgtcaccattgctgatccttctgcagtctctcgccgtatcaactacgatctgactctagaagtatctgaggcctacaagaaacacacacggctgaattttgacttggctttcaggcgcacagacgccccccccatttatccttttgctgcccatgtgccctttgtggacgtagctgtgcgcttcaaaaatggtcaccagaattttaatctcctagagttggtcgattccatttgtacagacattcgagccaagcaacaaggtgcccgaaacatgcagactctggttctacagagccccaacgagaatgatgacacccccgtcgacgaggcgttgggtagagttctctcccccgctgcggtcgatgaggcgcttgtcgacctcactccagaggccgacccggttggccgtttggctattcttgccaagctaggtcttgccctagctgcggtcacccctggtctgataatcttggcagtgggactctacaggtacttctctggctctgatgcagaccaagaagaaacagaaagtgagggatctgtcaaggcacccaggagcgaaaatgcttatgacggcccgaagaaaaactctaagccccctggagcactctctctcatggaaatgcaacagcccaacgtggacatgggctttgaggctgcggtcgctaagaaagtggtcgtccccattaccttcatggttcccaacagaccttctgggcttacacagtccgctcttctggtgaccggccggaccttcctaatcaatgaacatacatggtccaatccctcctggaccagcttcacaatccgcggtgaggtacacactcgtgatgagcccttccaaacggttcatttcactcaccacggtattcccacagatctgatgatggtacgtctcggaccgggcaattctttccctaacaatctagacaagtttggacttgaccagatgccggcacgcaactcccgtgtggttggcgtttcgtccagttacggaaacttcttcttctctggaaatttcctcggatttgttgattccatcacctctgaacaaggaacttacgcaagactctttaggtacagggtgacgacctacaaaggatggtgcggctcggccctggtctgtgaggccggtggcgtccgacgcatcattggcctgcattctgctggcgccgccggtatcggcgccgggacctatatctcaaaattaggactaatcaaagccctgaaacacctcggtgaacctttggccacaatgcaaggactgatgactgaattagagcctggaatcaccgtacatgtaccccggaaatccaaattgagaaagacgaccgcacacgcggtgtacaaaccggagtttgagcctgctgtgttgtcaaaatttgatcccagactgaacaaggatgttgacttggatgaagtaatttggtctaaacacactgccaatgtcccttaccaacctcctttgttctacacatacatgtcagagtacgctcatcgagtcttctccttcttggggaaagacaatgacattctgaccgtcaaagaagcaattctgggcatccccggactagaccccatggatccccacacagctccgggtctgccttacgccatcaacggccttcgacgtactgatctcgtcgattttgtgaacggtacagtagatgcggcgctggctgtacaaatccagaaattcttagacggtgactactctgaccatgtcttccaaacttttctgaaagatgagatcagaccctcagagaaagtccgagcgggaaaaacccgcattgttgatgtgccctccctggcgcattgcattgtgggcagaatgttgcttgggcgctttgctgccaagtttcaatcccatcctggctttctcctcggctctgctatcgggtctgaccctgatgttttctggaccgtcataggggctcaactcgaggggagaaagaacacgtatgacgtggactacagtgcctttgactcttcacacggcactggctccttcgaggctctcatctctcactttttcaccgtggacaatggttttagccctgcgctgggaccgtatctcagatccctggctgtctcggtgcacgcttacggcgagcgtcgcatcaagattaccggtggcctcccctccggttgtgccgcgaccagcctgctgaacacagtgctcaacaatgtgatcatcaggactgctctggcattgacttacaaggaatttgaatatgacatggttgatatcatcgcctacggtgacgaccttctggttggcacggattacgatctggacttcaatgaggtggcacgacgcgctgccaagttggggtataagatgactcctgccaacaagggttctgtcttccctccgacttcctctctttccgatgctgtttttctaaagcgcaaattcgtccaaaacaacgacggcttatacaaaccagttatggatttaaagaatttggaagccatgctctcctacttcaaaccaggaacactactcgagaagctgcaatctgtttctatgttggctcaacattctggaaaagaagaatatgatagattgatgcaccccttcgctgactacggtgccgtaccgagtcacgagtacctgcaggcaagatggagggccttgttcgactgacccagatagcccaaggcgcttcggtgctgccggcgattctgggagaactcagtcggaacagaaaagggaaaaaaaaaaaaaaaaaaaaaaaaaaaaaaggccggcatggtcccagcctcctcgctggcgccggctgggcaacatgcttcggcatggcgaatgggacgcggccgctcgagtctagagggcccgtttaaacccgctgatcagcctcgactgtgccttctagttgccagccatctgttgtttgcccctcccccgtgccttccttgaccctggaaggtgccactcccactgtcctttcctaataaaatgaggaaattgcatcgcattgtctgagtaggtgtcattctattctggggggtggggtggggcaggacagcaagggggaggattgggaagacaatagcaggcatgctggggatgcggtgggctctatgggttggcattataagaaagcattgcttatcaatttgttgcaacgaacaggtcactatcagtcaaaataaaatcattatttgccatccagctgcagctctggcccgtgtctcaaaatctctgatgttacattgcacaagataaaaatatatcatcatgaacaataaaactgtctgcttacataaacagtaatacaaggggtgttatgagccatattcaacgggaaacgtcgaggccgcgattaaattccaacatggatgctgatttatatgggtataaatgggctcgcgataatgtcgggcaatcaggtgcgacaatctatcgcttgtatgggaagcccgatgcgccagagttgtttctgaaacatggcaaaggtagcgttgccaatgatgttacagatgagatggtcagactaaactggctgacggaatttatgcctcttccgaccatcaagcattttatccgtactcctgatgatgcatggttactcaccactgcgatccccggaaaaacagcattccaggtattagaagaatatcctgattcaggtgaaaatattgttgatgcgctggcagtgtccctgcgccggttgcattcgattcctgtttgtaattgtccttttaacagcgatcgcgtatttcgtctcgctcaggcgcaatcacgaatgaataacggtttggttgatgcgagtgattttgatgacgagcgtaatggctggcctgttgaacaagtctggaaagaaatgcataaacttttgccattctcaccggattcagtcgtcactcatggtgatttctcacttgataaccttatttttgacgaggggaaattaataggttgtattgatgttggacgagtcggaatcgcagaccgataccaggatcttgccatcctatggaactgcctcggtgagttttctccttcattacagaaacggctttttcaaaaatatggtattgataatcctgatatgaataaattgcagtttcatttgatgctcgatgagtttttctaatcagaattggttaattggttgtaacattattcagattgggccccgttccactgagcgtcagaccccgtagaaaagatcaaaggatcttcttgagatcctttttttctgcgcgtaatctgctgcttgcaaacaaaaaaaccaccgctaccagcggtggtttgtttgccggatcaagagctaccaactctttttccgaaggtaactggcttcagcagagcgcagataccaaatactgttcttctagtgtagccgtagttaggccaccacttcaagaactctgtagcaccgcctacatacctcgctctgctaatcctgttaccagtggctgctgccagtggcgataagtcgtgtcttaccgggttggactcaagacgatagttaccggataaggcgcagcggtcgggctgaacggggggttcgtgcacacagcccagcttggagcgaacgacctacaccgaactgagatacctacagcgtgagctatgagaaagcgccacgcttcccgaagggagaaaggcggacaggtatccggtaagcggcagggtcggaacaggagagcgcacgagggagcttccagggggaaacgcctggtatctttatagtcctgtcgggtttcgccacctctgacttgagcgtcgatttttgtgatgctcgtcaggggggcggagcctatggaaaaacgccagcaacgcggcctttttacggttcctggccttttgctggccttttgctcacatgttctttcctgcgttatcccctgattctgtggataaccgtattaccgctagcatggatctcggggacgtctaactactaagcgagagtagggaactgccaggcatcaaataaaacgaaaggctcagtcggaagactgggcctttcgttttatctgttgtttgtcggtgaacgctctcctgagtaggacaaatccgccgggagcggatttgaacgttgtgaagcaacggcccggagggtggcgggcaggacgcccgccataaactgccaggcatcaaactaagcagaaggccatc

SEQ ID NO: 40 - RNA, 7001 nt, Artificial Sequence
  pJJViper-mFAP-BiTE-3C-mCXCL10 RNA
uuugaaauggggggcugggcccugaugcccaguccuuccuuuccccuuccgggggguuaaccggcuguguuugcuagaggcacagaggggcaacauccaaccugcuuuugcggggaacggugcggcuccgauuccugcgucgccaaagguguuagcgcacccaaacggcgcaccuaccaauguuauugguguggucugcgaguucuagccuacucguuucucccccgaccauucacucacccacgaaaaguguguuguaaccauaagauuuaacccccgcacgggaugugcgauaaccguaagacuggcucaagcgcggaaagcgcuguaaccacaugcuguuagucccuuuauggcugcaagauggcuacccaccucggaucacugaacuggagcucgacccuccuuaguaagggaaccgagaggccuucgugcaacaagcuccgacacagaguccacgugacugcuaccaccaugaguacaugguucuccccucucgacccaggacuucuuuuugaauauccacggcucgauccagaggguggggcaugaccccuagcauagcgagcuacagcgggaacuguagcuaggccuuagcgugccuuggauacugccugauagggcgacggccuagucgugucgguucuauagguagcacauacaaauaugcagaacucucauuuuucuuucgauacagccucuggcaccuuugaagauguaaccggaacaaaagucaagaucguugaauaccccagaucggugaacaaugguguuuacgauucgucuacucauuuggagauacugaaccuacagggugaaauugaaauuuuaaggucuuucaaugaauaccaaauucgcgccgccaaacaacaacucggacuggacaucguguacgaacuacaggguaauguucagacaacgucaaagaaugauuuugauucccguggcaauaaugguaacaugaccuucaauuacuacgcaaacacuuaucagaauucaguagacuucucgaccuccucgucggcgucaggcgccggaccugggaacucucggggcggauuagcgggucuccucacaaauuucaguggaaucuugaacccucuuggcuaccucaaagaucacaacaccgaagaaauggaaaacucugcugaucgagucacaacgcaaacggcgggcaacacugccauaaacacgcaaucaucauuggguguguugugugccuacguugaagacccgaccaaaucugauccuccguccagcucuggcgauaucgagaccaaucccgggccgauguacaggaugcaacuccugucuugcauugcacuaagucuugcacuugucacgaauucacaggugcagcuccagcagaguggcgcagagcucgcucgcccaggcgcuucugugaaucugaguuguaaggccuccggauauacuuuuacgaacaacggcaucaacuggcugaagcagcggaccggccagggccuggaguggaucggcgaaauauacccccgguccacaaacacucucuauaacgagaaguuuaagggcaaagcaacucugaccgcggacagguccucuaacacagccuauauggagcugagaagcuugacgagugaggacuccgcugucuauuuuugcgcccgaacucugaccgcuccuuuugcuuuuuggggccagggcacgcucgugaccguaagugcgggcuccacuagcgguuccggcaaaccuggcagcggagaaggcagcaccaaagggcagaucguccugacgcagucuccagccaucaugagcgccucacccggcgaaaaggugaccaugaccugcucagccucuucuggugugaauuucaugcacugguaccagcaaaaaagugggaccuccccuaaaagguggaucuucgauaccagcaaacuggcuucuggcguucccgcaagguuuagcggcucugguuccggcacaucauacagccugacgaucagcagcauggaggcagaagacgcagcuaccuauuacugccagcaauggagcuuuaacccaccuacuuucggaggaggaacaaagcuggaaauaaaaagagguggugguggaucagaggugcagcugguggagucugggggaggcuuggugcagccuggaaagucccugaaacucuccugugaggccucuggauucaccuucagcggcuauggcaugcacuggguccgccaggcuccagggagggggcuggagucggucgcauacauuacuaguaguaguauuaauaucaaauaugcugacgcugugaaaggccgguucaccgucuccagagacaaugccaagaacuuacuguuucuacaaaugaacauucucaagucugaggacacagccauguacuacugugcaagauucgacugggacaaaaauuacuggggccaaggaaccauggucaccgucuccucagguggugguggaucagguggaggcggaaguggagguggcggauccgacauccagaugacccagucuccaucaucacugccugccucccugggagacagagucacuaucaauugucaggccagucaggacauuagcaauuauuuaaacugguaccagcagaaaccagggaaagcuccuaagcuccugaucuauuauacaaauaaauuggcagauggagucccaucaagguucaguggcagugguucugggagagauucuucuuucacuaucagcagccuggaauccgaagauauuggaucuuauuacugucaacaguauuauaacuauccguggacguucggaccuggcaccaagcuggaaaucaaacggcaccaccaucaucaccacaucguguacgaacuacagggucccaugaacccaagugcugccgucauuuucugccucauccugcugggucugagugggacucaagggaucccucucgcaaggacgguccgcugcaacugcauccauaucgaugacgggccagugagaaugagggccauagggaagcuugaaaucaucccugcgagccuauccugcccacguguugagaucauugccacgaugaaaaagaaugaugagcagagaugucugaauccggaaucuaagaccaucaagaauuuaaugaaagcguuuagccaaaaaaggucuaaaagggcuccugagggcagaggaagucugcuaacaugcggugacgucgaggagaaucccgggccugcuucugacaacccaauuuuggaguuucuugaagcagaaaaugaucuagucacucuggccucucucuggaagauggugcacucuguucaacagaccuggagaaaguaugugaagaacgaugauuuuuggcccaauuuacucagcgagcuagugggggaaggcucugucgccuuggccgccacgcuauccaaccaagcuucaguaaaggcucuuuugggccugcacuuucucucucgggggcucaauuacacugacuuuuacucuuuacugauagagaaaugcucuaguuucuuuaccguagaaccaccuccuccaccagcugaaaaccugaugaccaagcccucagugaagucgaaauuccgaaaacuguuuaagaugcaaggacccauggacaaagucaaagacuggaaccaaauagcugccggcuugaagaauuuucaauuuguucgugaccuagucaaagagguggucgauuggcugcaggccuggaucaacaaagagaaagccagcccuguccuccaguaccaguuggagaugaagaagcucgggccuguggccuuggcucaugacgcuuucauggcugguuccgggcccccucuuagcgacgaccagauugaauaccuccagaaccucaaaucucuugcccuaacacuggggaagacuaauuuggcccaaagucucaccacuaugaucaaugccaaacaaaguucagcccaacgaguugaacccguuguggugguccuuagaggcaagccgggaugcggcaagagcuuggccucuacguugauugcccaggcuguguccaagcgccucuauggcucccaaaguguauauucucuucccccagauccagauuucuucgauggauacaaaggacaguucgugaccuugauggaugauuugggacaaaacccggauggacaagauuucuccaccuuuugucagauggugucgaccgcccaauuucuccccaacauggcggaccuugcagagaaagggcgucccuuuaccuccaaucucaucauugcaacuacaaaucucccccacuucaguccugucaccauugcugauccuucugcagucucucgccguaucaacuacgaucugacucuagaaguaucugaggccuacaagaaacacacacggcugaauuuugacuuggcuuucaggcgcacagacgccccccccauuuauccuuuugcugcccaugugcccuuuguggacguagcugugcgcuucaaaaauggucaccagaauuuuaaucuccuagaguuggucgauuccauuuguacagacauucgagccaagcaacaaggugcccgaaacaugcagacucugguucuacagagccccaacgagaaugaugacacccccgucgacgaggcguuggguagaguucucucccccgcugcggucgaugaggcgcuugucgaccucacuccagaggccgacccgguuggccguuuggcuauucuugccaagcuaggucuugcccuagcugcggucaccccuggucugauaaucuuggcagugggacucuacagguacuucucuggcucugaugcagaccaagaagaaacagaaagugagggaucugucaaggcacccaggagcgaaaaugcuuaugacggcccgaagaaaaacucuaagcccccuggagcacucucucucauggaaaugcaacagcccaacguggacaugggcuuugaggcugcggucgcuaagaaaguggucguccccauuaccuucaugguucccaacagaccuucugggcuuacacaguccgcucuucuggugaccggccggaccuuccuaaucaaugaacauacaugguccaaucccuccuggaccagcuucacaauccgcggugagguacacacucgugaugagcccuuccaaacgguucauuucacucaccacgguauucccacagaucugaugaugguacgucucggaccgggcaauucuuucccuaacaaucuagacaaguuuggacuugaccagaugccggcacgcaacucccgugugguuggcguuucguccaguuacggaaacuucuucuucucuggaaauuuccucggauuuguugauuccaucaccucugaacaaggaacuuacgcaagacucuuuagguacagggugacgaccuacaaaggauggugcggcucggcccuggucugugaggccgguggcguccgacgcaucauuggccugcauucugcuggcgccgccgguaucggcgccgggaccuauaucucaaaauuaggacuaaucaaagcccugaaacaccucggugaaccuuuggccacaaugcaaggacugaugacugaauuagagccuggaaucaccguacauguaccccggaaauccaaauugagaaagacgaccgcacacgcgguguacaaaccggaguuugagccugcuguguugucaaaauuugaucccagacugaacaaggauguugacuuggaugaaguaauuuggucuaaacacacugccaaugucccuuaccaaccuccuuuguucuacacauacaugucagaguacgcucaucgagucuucuccuucuuggggaaagacaaugacauucugaccgucaaagaagcaauucugggcauccccggacuagaccccauggauccccacacagcuccgggucugccuuacgccaucaacggccuucgacguacugaucucgucgauuuugugaacgguacaguagaugcggcgcuggcuguacaaauccagaaauucuuagacggugacuacucugaccaugucuuccaaacuuuucugaaagaugagaucagacccucagagaaaguccgagcgggaaaaacccgcauuguugaugugcccucccuggcgcauugcauugugggcagaauguugcuugggcgcuuugcugccaaguuucaaucccauccuggcuuucuccucggcucugcuaucgggucugacccugauguuuucuggaccgucauaggggcucaacucgaggggagaaagaacacguaugacguggacuacagugccuuugacucuucacacggcacuggcuccuucgaggcucucaucucucacuuuuucaccguggacaaugguuuuagcccugcgcugggaccguaucucagaucccuggcugucucggugcacgcuuacggcgagcgucgcaucaagauuaccgguggccuccccuccgguugugccgcgaccagccugcugaacacagugcucaacaaugugaucaucaggacugcucuggcauugacuuacaaggaauuugaauaugacaugguugauaucaucgccuacggugacgaccuucugguuggcacggauuacgaucuggacuucaaugagguggcacgacgcgcugccaaguugggguauaagaugacuccugccaacaaggguucugucuucccuccgacuuccucucuuuccgaugcuguuuuucuaaagcgcaaauucguccaaaacaacgacggcuuauacaaaccaguuauggauuuaaagaauuuggaagccaugcucuccuacuucaaaccaggaacacuacucgagaagcugcaaucuguuucuauguuggcucaacauucuggaaaagaagaauaugauagauugaugcaccccuucgcugacuacggugccguaccgagucacgaguaccugcaggcaagauggagggccuuguucgacugacccagauagcccaaggcgcuucggugcugccggcgauucugggagaacucagucggaacagaaaagggaaaaaaaaaaaaaaaaaaaaaaaaaaaaaa

SEQ ID NO: 41 - DNA, 10275 bp, Artificial Sequence
  pJJViper-mFAP-BiTE-furin-3C-mCXCL10
ctgacggatggcctttttgcgtttctacaaactcttcctgttagttagttacttaagctcgggccccaaataatgattttattttgactgatagtgacctgttcgttgcaacaaattgataagcaatgcttttttataatgccaacattgattattgactagttattaatagtaatcaattacggggtcattagttcatagcccatatatggagttccgcgttacataacttacggtaaatggcccgcctggctgaccgcccaacgacccccgcccattgacgtcaataatgacgtatgttcccatagtaacgccaatagggactttccattgacgtcaatgggtggagtatttacggtaaactgcccacttggcagtacatcaagtgtatcatatgccaagtacgccccctattgacgtcaatgacggtaaatggcccgcctggcattatgcccagtacatgaccttatgggactttcctacttggcagtacatctacgtattagtcatcgctattaccatggtgatgcggttttggcagtacatcaatgggcgtggatagcggtttgactcacggggatttccaagtctccaccccattgacgtcaatgggagtttgttttggcaccaaaatcaacgggactttccaaaatgtcgtaacaactccgccccattgacgcaaatgggcggtaggcgtgtacggtgggaggtctatataagcagagctctctggctaactagagaacccactgcttactggcttatcgaaattaatacgactcactatagggagacccaagctggctagcgtttaaacttaagcttggtaccttatcaaactgatgagtccgtgaggacgaaacgagtaagctcgtctttgaaatggggggctgggccctgatgcccagtccttcctttccccttccggggggttaaccggctgtgtttgctagaggcacagaggggcaacatccaacctgcttttgcggggaacggtgcggctccgattcctgcgtcgccaaaggtgttagcgcacccaaacggcgcacctaccaatgttattggtgtggtctgcgagttctagcctactcgtttctcccccgaccattcactcacccacgaaaagtgtgttgtaaccataagatttaacccccgcacgggatgtgcgataaccgtaagactggctcaagcgcggaaagcgctgtaaccacatgctgttagtccctttatggctgcaagatggctacccacctcggatcactgaactggagctcgaccctccttagtaagggaaccgagaggccttcgtgcaacaagctccgacacagagtccacgtgactgctaccaccatgagtacatggttctcccctctcgacccaggacttctttttgaatatccacggctcgatccagagggtggggcatgacccctagcatagcgagctacagcgggaactgtagctaggccttagcgtgccttggatactgcctgatagggcgacggcctagtcgtgtcggttctataggtagcacatacaaatatgcagaactctcatttttctttcgatacagcctctggcacctttgaagatgtaaccggaacaaaagtcaagatcgttgaataccccagatcggtgaacaatggtgtttacgattcgtctactcatttggagatactgaacctacagggtgaaattgaaattttaaggtctttcaatgaataccaaattcgcgccgccaaacaacaactcggactggacatcgtgtacgaactacagggtaatgttcagacaacgtcaaagaatgattttgattcccgtggcaataatggtaacatgaccttcaattactacgcaaacacttatcagaattcagtagacttctcgacctcctcgtcggcgtcaggcgccggacctgggaactctcggggcggattagcgggtctcctcacaaatttcagtggaatcttgaaccctcttggctacctcaaagatcacaacaccgaagaaatggaaaactctgctgatcgagtcacaacgcaaacggcgggcaacactgccataaacacgcaatcatcattgggtgtgttgtgtgcctacgttgaagacccgaccaaatctgatcctccgtccagctctggcgatatcgagaccaatcccgggccgatgtacaggatgcaactcctgtcttgcattgcactaagtcttgcacttgtcacgaattcacaggtgcagctccagcagagtggcgcagagctcgctcgcccaggcgcttctgtgaatctgagttgtaaggcctccggatatacttttacgaacaacggcatcaactggctgaagcagcggaccggccagggcctggagtggatcggcgaaatatacccccggtccacaaacactctctataacgagaagtttaagggcaaagcaactctgaccgcggacaggtcctctaacacagcctatatggagctgagaagcttgacgagtgaggactccgctgtctatttttgcgcccgaactctgaccgctccttttgctttttggggccagggcacgctcgtgaccgtaagtgcgggctccactagcggttccggcaaacctggcagcggagaaggcagcaccaaagggcagatcgtcctgacgcagtctccagccatcatgagcgcctcacccggcgaaaaggtgaccatgacctgctcagcctcttctggtgtgaatttcatgcactggtaccagcaaaaaagtgggacctcccctaaaaggtggatcttcgataccagcaaactggcttctggcgttcccgcaaggtttagcggctctggttccggcacatcatacagcctgacgatcagcagcatggaggcagaagacgcagctacctattactgccagcaatggagctttaacccacctactttcggaggaggaacaaagctggaaataaaaagaggtggtggtggatcagaggtgcagctggtggagtctgggggaggcttggtgcagcctggaaagtccctgaaactctcctgtgaggcctctggattcaccttcagcggctatggcatgcactgggtccgccaggctccagggagggggctggagtcggtcgcatacattactagtagtagtattaatatcaaatatgctgacgctgtgaaaggccggttcaccgtctccagagacaatgccaagaacttactgtttctacaaatgaacattctcaagtctgaggacacagccatgtactactgtgcaagattcgactgggacaaaaattactggggccaaggaaccatggtcaccgtctcctcaggtggtggtggatcaggtggaggcggaagtggaggtggcggatccgacatccagatgacccagtctccatcatcactgcctgcctccctgggagacagagtcactatcaattgtcaggccagtcaggacattagcaattatttaaactggtaccagcagaaaccagggaaagctcctaagctcctgatctattatacaaataaattggcagatggagtcccatcaaggttcagtggcagtggttctgggagagattcttctttcactatcagcagcctggaatccgaagatattggatcttattactgtcaacagtattataactatccgtggacgttcggacctggcaccaagctggaaatcaaacggcaccaccatcatcaccacagacgaaagcggatcgtgtacgaactacagggtcccatgaacccaagtgctgccgtcattttctgcctcatcctgctgggtctgagtgggactcaagggatccctctcgcaaggacggtccgctgcaactgcatccatatcgatgacgggccagtgagaatgagggccatagggaagcttgaaatcatccctgcgagcctatcctgcccacgtgttgagatcattgccacgatgaaaaagaatgatgagcagagatgtctgaatccggaatctaagaccatcaagaatttaatgaaagcgtttagccaaaaaaggtctaaaagggctcctgagggcagaggaagtctgctaacatgcggtgacgtcgaggagaatcccgggcctgcttctgacaacccaattttggagtttcttgaagcagaaaatgatctagtcactctggcctctctctggaagatggtgcactctgttcaacagacctggagaaagtatgtgaagaacgatgatttttggcccaatttactcagcgagctagtgggggaaggctctgtcgccttggccgccacgctatccaaccaagcttcagtaaaggctcttttgggcctgcactttctctctcgggggctcaattacactgacttttactctttactgatagagaaatgctctagtttctttaccgtagaaccacctcctccaccagctgaaaacctgatgaccaagccctcagtgaagtcgaaattccgaaaactgtttaagatgcaaggacccatggacaaagtcaaagactggaaccaaatagctgccggcttgaagaattttcaatttgttcgtgacctagtcaaagaggtggtcgattggctgcaggcctggatcaacaaagagaaagccagccctgtcctccagtaccagttggagatgaagaagctcgggcctgtggccttggctcatgacgctttcatggctggttccgggccccctcttagcgacgaccagattgaatacctccagaacctcaaatctcttgccctaacactggggaagactaatttggcccaaagtctcaccactatgatcaatgccaaacaaagttcagcccaacgagttgaacccgttgtggtggtccttagaggcaagccgggatgcggcaagagcttggcctctacgttgattgcccaggctgtgtccaagcgcctctatggctcccaaagtgtatattctcttcccccagatccagatttcttcgatggatacaaaggacagttcgtgaccttgatggatgatttgggacaaaacccggatggacaagatttctccaccttttgtcagatggtgtcgaccgcccaatttctccccaacatggcggaccttgcagagaaagggcgtccctttacctccaatctcatcattgcaactacaaatctcccccacttcagtcctgtcaccattgctgatccttctgcagtctctcgccgtatcaactacgatctgactctagaagtatctgaggcctacaagaaacacacacggctgaattttgacttggctttcaggcgcacagacgccccccccatttatccttttgctgcccatgtgccctttgtggacgtagctgtgcgcttcaaaaatggtcaccagaattttaatctcctagagttggtcgattccatttgtacagacattcgagccaagcaacaaggtgcccgaaacatgcagactctggttctacagagccccaacgagaatgatgacacccccgtcgacgaggcgttgggtagagttctctcccccgctgcggtcgatgaggcgcttgtcgacctcactccagaggccgacccggttggccgtttggctattcttgccaagctaggtcttgccctagctgcggtcacccctggtctgataatcttggcagtgggactctacaggtacttctctggctctgatgcagaccaagaagaaacagaaagtgagggatctgtcaaggcacccaggagcgaaaatgcttatgacggcccgaagaaaaactctaagccccctggagcactctctctcatggaaatgcaacagcccaacgtggacatgggctttgaggctgcggtcgctaagaaagtggtcgtccccattaccttcatggttcccaacagaccttctgggcttacacagtccgctcttctggtgaccggccggaccttcctaatcaatgaacatacatggtccaatccctcctggaccagcttcacaatccgcggtgaggtacacactcgtgatgagcccttccaaacggttcatttcactcaccacggtattcccacagatctgatgatggtacgtctcggaccgggcaattctttccctaacaatctagacaagtttggacttgaccagatgccggcacgcaactcccgtgtggttggcgtttcgtccagttacggaaacttcttcttctctggaaatttcctcggatttgttgattccatcacctctgaacaaggaacttacgcaagactctttaggtacagggtgacgacctacaaaggatggtgcggctcggccctggtctgtgaggccggtggcgtccgacgcatcattggcctgcattctgctggcgccgccggtatcggcgccgggacctatatctcaaaattaggactaatcaaagccctgaaacacctcggtgaacctttggccacaatgcaaggactgatgactgaattagagcctggaatcaccgtacatgtaccccggaaatccaaattgagaaagacgaccgcacacgcggtgtacaaaccggagtttgagcctgctgtgttgtcaaaatttgatcccagactgaacaaggatgttgacttggatgaagtaatttggtctaaacacactgccaatgtcccttaccaacctcctttgttctacacatacatgtcagagtacgctcatcgagtcttctccttcttggggaaagacaatgacattctgaccgtcaaagaagcaattctgggcatccccggactagaccccatggatccccacacagctccgggtctgccttacgccatcaacggccttcgacgtactgatctcgtcgattttgtgaacggtacagtagatgcggcgctggctgtacaaatccagaaattcttagacggtgactactctgaccatgtcttccaaacttttctgaaagatgagatcagaccctcagagaaagtccgagcgggaaaaacccgcattgttgatgtgccctccctggcgcattgcattgtgggcagaatgttgcttgggcgctttgctgccaagtttcaatcccatcctggctttctcctcggctctgctatcgggtctgaccctgatgttttctggaccgtcataggggctcaactcgaggggagaaagaacacgtatgacgtggactacagtgcctttgactcttcacacggcactggctccttcgaggctctcatctctcactttttcaccgtggacaatggttttagccctgcgctgggaccgtatctcagatccctggctgtctcggtgcacgcttacggcgagcgtcgcatcaagattaccggtggcctcccctccggttgtgccgcgaccagcctgctgaacacagtgctcaacaatgtgatcatcaggactgctctggcattgacttacaaggaatttgaatatgacatggttgatatcatcgcctacggtgacgaccttctggttggcacggattacgatctggacttcaatgaggtggcacgacgcgctgccaagttggggtataagatgactcctgccaacaagggttctgtcttccctccgacttcctctctttccgatgctgtttttctaaagcgcaaattcgtccaaaacaacgacggcttatacaaaccagttatggatttaaagaatttggaagccatgctctcctacttcaaaccaggaacactactcgagaagctgcaatctgtttctatgttggctcaacattctggaaaagaagaatatgatagattgatgcaccccttcgctgactacggtgccgtaccgagtcacgagtacctgcaggcaagatggagggccttgttcgactgacccagatagcccaaggcgcttcggtgctgccggcgattctgggagaactcagtcggaacagaaaagggaaaaaaaaaaaaaaaaaaaaaaaaaaaaaaggccggcatggtcccagcctcctcgctggcgccggctgggcaacatgcttcggcatggcgaatgggacgcggccgctcgagtctagagggcccgtttaaacccgctgatcagcctcgactgtgccttctagttgccagccatctgttgtttgcccctcccccgtgccttccttgaccctggaaggtgccactcccactgtcctttcctaataaaatgaggaaattgcatcgcattgtctgagtaggtgtcattctattctggggggtggggtggggcaggacagcaagggggaggattgggaagacaatagcaggcatgctggggatgcggtgggctctatgggttggcattataagaaagcattgcttatcaatttgttgcaacgaacaggtcactatcagtcaaaataaaatcattatttgccatccagctgcagctctggcccgtgtctcaaaatctctgatgttacattgcacaagataaaaatatatcatcatgaacaataaaactgtctgcttacataaacagtaatacaaggggtgttatgagccatattcaacgggaaacgtcgaggccgcgattaaattccaacatggatgctgatttatatgggtataaatgggctcgcgataatgtcgggcaatcaggtgcgacaatctatcgcttgtatgggaagcccgatgcgccagagttgtttctgaaacatggcaaaggtagcgttgccaatgatgttacagatgagatggtcagactaaactggctgacggaatttatgcctcttccgaccatcaagcattttatccgtactcctgatgatgcatggttactcaccactgcgatccccggaaaaacagcattccaggtattagaagaatatcctgattcaggtgaaaatattgttgatgcgctggcagtgtccctgcgccggttgcattcgattcctgtttgtaattgtccttttaacagcgatcgcgtatttcgtctcgctcaggcgcaatcacgaatgaataacggtttggttgatgcgagtgattttgatgacgagcgtaatggctggcctgttgaacaagtctggaaagaaatgcataaacttttgccattctcaccggattcagtcgtcactcatggtgatttctcacttgataaccttatttttgacgaggggaaattaataggttgtattgatgttggacgagtcggaatcgcagaccgataccaggatcttgccatcctatggaactgcctcggtgagttttctccttcattacagaaacggctttttcaaaaatatggtattgataatcctgatatgaataaattgcagtttcatttgatgctcgatgagtttttctaatcagaattggttaattggttgtaacattattcagattgggccccgttccactgagcgtcagaccccgtagaaaagatcaaaggatcttcttgagatcctttttttctgcgcgtaatctgctgcttgcaaacaaaaaaaccaccgctaccagcggtggtttgtttgccggatcaagagctaccaactctttttccgaaggtaactggcttcagcagagcgcagataccaaatactgttcttctagtgtagccgtagttaggccaccacttcaagaactctgtagcaccgcctacatacctcgctctgctaatcctgttaccagtggctgctgccagtggcgataagtcgtgtcttaccgggttggactcaagacgatagttaccggataaggcgcagcggtcgggctgaacggggggttcgtgcacacagcccagcttggagcgaacgacctacaccgaactgagatacctacagcgtgagctatgagaaagcgccacgcttcccgaagggagaaaggcggacaggtatccggtaagcggcagggtcggaacaggagagcgcacgagggagcttccagggggaaacgcctggtatctttatagtcctgtcgggtttcgccacctctgacttgagcgtcgatttttgtgatgctcgtcaggggggcggagcctatggaaaaacgccagcaacgcggcctttttacggttcctggccttttgctggccttttgctcacatgttctttcctgcgttatcccctgattctgtggataaccgtattaccgctagcatggatctcggggacgtctaactactaagcgagagtagggaactgccaggcatcaaataaaacgaaaggctcagtcggaagactgggcctttcgttttatctgttgtttgtcggtgaacgctctcctgagtaggacaaatccgccgggagcggatttgaacgttgtgaagcaacggcccggagggtggcgggcaggacgcccgccataaactgccaggcatcaaactaagcagaaggccatc

SEQ ID NO: 42 - RNA, 7013 nt, Artificial Sequence
  pJJViper-mFAP-BiTE-furin-3C-mCXCL10 RNA
uuugaaauggggggcugggcccugaugcccaguccuuccuuuccccuuccgggggguuaaccggcuguguuugcuagaggcacagaggggcaacauccaaccugcuuuugcggggaacggugcggcuccgauuccugcgucgccaaagguguuagcgcacccaaacggcgcaccuaccaauguuauugguguggucugcgaguucuagccuacucguuucucccccgaccauucacucacccacgaaaaguguguuguaaccauaagauuuaacccccgcacgggaugugcgauaaccguaagacuggcucaagcgcggaaagcgcuguaaccacaugcuguuagucccuuuauggcugcaagauggcuacccaccucggaucacugaacuggagcucgacccuccuuaguaagggaaccgagaggccuucgugcaacaagcuccgacacagaguccacgugacugcuaccaccaugaguacaugguucuccccucucgacccaggacuucuuuuugaauauccacggcucgauccagaggguggggcaugaccccuagcauagcgagcuacagcgggaacuguagcuaggccuuagcgugccuuggauacugccugauagggcgacggccuagucgugucgguucuauagguagcacauacaaauaugcagaacucucauuuuucuuucgauacagccucuggcaccuuugaagauguaaccggaacaaaagucaagaucguugaauaccccagaucggugaacaaugguguuuacgauucgucuacucauuuggagauacugaaccuacagggugaaauugaaauuuuaaggucuuucaaugaauaccaaauucgcgccgccaaacaacaacucggacuggacaucguguacgaacuacaggguaauguucagacaacgucaaagaaugauuuugauucccguggcaauaaugguaacaugaccuucaauuacuacgcaaacacuuaucagaauucaguagacuucucgaccuccucgucggcgucaggcgccggaccugggaacucucggggcggauuagcgggucuccucacaaauuucaguggaaucuugaacccucuuggcuaccucaaagaucacaacaccgaagaaauggaaaacucugcugaucgagucacaacgcaaacggcgggcaacacugccauaaacacgcaaucaucauuggguguguugugugccuacguugaagacccgaccaaaucugauccuccguccagcucuggcgauaucgagaccaaucccgggccgauguacaggaugcaacuccugucuugcauugcacuaagucuugcacuugucacgaauucacaggugcagcuccagcagaguggcgcagagcucgcucgcccaggcgcuucugugaaucugaguuguaaggccuccggauauacuuuuacgaacaacggcaucaacuggcugaagcagcggaccggccagggccuggaguggaucggcgaaauauacccccgguccacaaacacucucuauaacgagaaguuuaagggcaaagcaacucugaccgcggacagguccucuaacacagccuauauggagcugagaagcuugacgagugaggacuccgcugucuauuuuugcgcccgaacucugaccgcuccuuuugcuuuuuggggccagggcacgcucgugaccguaagugcgggcuccacuagcgguuccggcaaaccuggcagcggagaaggcagcaccaaagggcagaucguccugacgcagucuccagccaucaugagcgccucacccggcgaaaaggugaccaugaccugcucagccucuucuggugugaauuucaugcacugguaccagcaaaaaagugggaccuccccuaaaagguggaucuucgauaccagcaaacuggcuucuggcguucccgcaagguuuagcggcucugguuccggcacaucauacagccugacgaucagcagcauggaggcagaagacgcagcuaccuauuacugccagcaauggagcuuuaacccaccuacuuucggaggaggaacaaagcuggaaauaaaaagagguggugguggaucagaggugcagcugguggagucugggggaggcuuggugcagccuggaaagucccugaaacucuccugugaggccucuggauucaccuucagcggcuauggcaugcacuggguccgccaggcuccagggagggggcuggagucggucgcauacauuacuaguaguaguauuaauaucaaauaugcugacgcugugaaaggccgguucaccgucuccagagacaaugccaagaacuuacuguuucuacaaaugaacauucucaagucugaggacacagccauguacuacugugcaagauucgacugggacaaaaauuacuggggccaaggaaccauggucaccgucuccucagguggugguggaucagguggaggcggaaguggagguggcggauccgacauccagaugacccagucuccaucaucacugccugccucccugggagacagagucacuaucaauugucaggccagucaggacauuagcaauuauuuaaacugguaccagcagaaaccagggaaagcuccuaagcuccugaucuauuauacaaauaaauuggcagauggagucccaucaagguucaguggcagugguucugggagagauucuucuuucacuaucagcagccuggaauccgaagauauuggaucuuauuacugucaacaguauuauaacuauccguggacguucggaccuggcaccaagcuggaaaucaaacggcaccaccaucaucaccacagacgaaagcggaucguguacgaacuacagggucccaugaacccaagugcugccgucauuuucugccucauccugcugggucugagugggacucaagggaucccucucgcaaggacgguccgcugcaacugcauccauaucgaugacgggccagugagaaugagggccauagggaagcuugaaaucaucccugcgagccuauccugcccacguguugagaucauugccacgaugaaaaagaaugaugagcagagaugucugaauccggaaucuaagaccaucaagaauuuaaugaaagcguuuagccaaaaaaggucuaaaagggcuccugagggcagaggaagucugcuaacaugcggugacgucgaggagaaucccgggccugcuucugacaacccaauuuuggaguuucuugaagcagaaaaugaucuagucacucuggccucucucuggaagauggugcacucuguucaacagaccuggagaaaguaugugaagaacgaugauuuuuggcccaauuuacucagcgagcuagugggggaaggcucugucgccuuggccgccacgcuauccaaccaagcuucaguaaaggcucuuuugggccugcacuuucucucucgggggcucaauuacacugacuuuuacucuuuacugauagagaaaugcucuaguuucuuuaccguagaaccaccuccuccaccagcugaaaaccugaugaccaagcccucagugaagucgaaauuccgaaaacuguuuaagaugcaaggacccauggacaaagucaaagacuggaaccaaauagcugccggcuugaagaauuuucaauuuguucgugaccuagucaaagagguggucgauuggcugcaggccuggaucaacaaagagaaagccagcccuguccuccaguaccaguuggagaugaagaagcucgggccuguggccuuggcucaugacgcuuucauggcugguuccgggcccccucuuagcgacgaccagauugaauaccuccagaaccucaaaucucuugcccuaacacuggggaagacuaauuuggcccaaagucucaccacuaugaucaaugccaaacaaaguucagcccaacgaguugaacccguuguggugguccuuagaggcaagccgggaugcggcaagagcuuggccucuacguugauugcccaggcuguguccaagcgccucuauggcucccaaaguguauauucucuucccccagauccagauuucuucgauggauacaaaggacaguucgugaccuugauggaugauuugggacaaaacccggauggacaagauuucuccaccuuuugucagauggugucgaccgcccaauuucuccccaacauggcggaccuugcagagaaagggcgucccuuuaccuccaaucucaucauugcaacuacaaaucucccccacuucaguccugucaccauugcugauccuucugcagucucucgccguaucaacuacgaucugacucuagaaguaucugaggccuacaagaaacacacacggcugaauuuugacuuggcuuucaggcgcacagacgccccccccauuuauccuuuugcugcccaugugcccuuuguggacguagcugugcgcuucaaaaauggucaccagaauuuuaaucuccuagaguuggucgauuccauuuguacagacauucgagccaagcaacaaggugcccgaaacaugcagacucugguucuacagagccccaacgagaaugaugacacccccgucgacgaggcguuggguagaguucucucccccgcugcggucgaugaggcgcuugucgaccucacuccagaggccgacccgguuggccguuuggcuauucuugccaagcuaggucuugcccuagcugcggucaccccuggucugauaaucuuggcagugggacucuacagguacuucucuggcucugaugcagaccaagaagaaacagaaagugagggaucugucaaggcacccaggagcgaaaaugcuuaugacggcccgaagaaaaacucuaagcccccuggagcacucucucucauggaaaugcaacagcccaacguggacaugggcuuugaggcugcggucgcuaagaaaguggucguccccauuaccuucaugguucccaacagaccuucugggcuuacacaguccgcucuucuggugaccggccggaccuuccuaaucaaugaacauacaugguccaaucccuccuggaccagcuucacaauccgcggugagguacacacucgugaugagcccuuccaaacgguucauuucacucaccacgguauucccacagaucugaugaugguacgucucggaccgggcaauucuuucccuaacaaucuagacaaguuuggacuugaccagaugccggcacgcaacucccgugugguuggcguuucguccaguuacggaaacuucuucuucucuggaaauuuccucggauuuguugauuccaucaccucugaacaaggaacuuacgcaagacucuuuagguacagggugacgaccuacaaaggauggugcggcucggcccuggucugugaggccgguggcguccgacgcaucauuggccugcauucugcuggcgccgccgguaucggcgccgggaccuauaucucaaaauuaggacuaaucaaagcccugaaacaccucggugaaccuuuggccacaaugcaaggacugaugacugaauuagagccuggaaucaccguacauguaccccggaaauccaaauugagaaagacgaccgcacacgcgguguacaaaccggaguuugagccugcuguguugucaaaauuugaucccagacugaacaaggauguugacuuggaugaaguaauuuggucuaaacacacugccaaugucccuuaccaaccuccuuuguucuacacauacaugucagaguacgcucaucgagucuucuccuucuuggggaaagacaaugacauucugaccgucaaagaagcaauucugggcauccccggacuagaccccauggauccccacacagcuccgggucugccuuacgccaucaacggccuucgacguacugaucucgucgauuuugugaacgguacaguagaugcggcgcuggcuguacaaauccagaaauucuuagacggugacuacucugaccaugucuuccaaacuuuucugaaagaugagaucagacccucagagaaaguccgagcgggaaaaacccgcauuguugaugugcccucccuggcgcauugcauugugggcagaauguugcuugggcgcuuugcugccaaguuucaaucccauccuggcuuucuccucggcucugcuaucgggucugacccugauguuuucuggaccgucauaggggcucaacucgaggggagaaagaacacguaugacguggacuacagugccuuugacucuucacacggcacuggcuccuucgaggcucucaucucucacuuuuucaccguggacaaugguuuuagcccugcgcugggaccguaucucagaucccuggcugucucggugcacgcuuacggcgagcgucgcaucaagauuaccgguggccuccccuccgguugugccgcgaccagccugcugaacacagugcucaacaaugugaucaucaggacugcucuggcauugacuuacaaggaauuugaauaugacaugguugauaucaucgccuacggugacgaccuucugguuggcacggauuacgaucuggacuucaaugagguggcacgacgcgcugccaaguugggguauaagaugacuccugccaacaaggguucugucuucccuccgacuuccucucuuuccgaugcuguuuuucuaaagcgcaaauucguccaaaacaacgacggcuuauacaaaccaguuauggauuuaaagaauuuggaagccaugcucuccuacuucaaaccaggaacacuacucgagaagcugcaaucuguuucuauguuggcucaacauucuggaaaagaagaauaugauagauugaugcaccccuucgcugacuacggugccguaccgagucacgaguaccugcaggcaagauggagggccuuguucgacugacccagauagcccaaggcgcuucggugcugccggcgauucugggagaacucagucggaacagaaaagggaaaaaaaaaaaaaaaaaaaaaaaaaaaaaa

SEQ ID NO: 43 - DNA, 9598 bp, Artificial Sequence
  SVV-Trunc10m FAP CD3 BiTE 6His T2Av2-CXCL10
cgcccccctgacgagcatcacaaaaatcgacgctcaagtcagaggtggcgaaacccgacaggactataaagataccaggcgtttccccctggaagctccctcgtgcgctctcctgttccgaccctgccgcttaccggatacctgtccgcctttctcccttcgggaagcgtggcgctttctcatagctcacgctgtaggtatctcagttcggtgtaggtcgttcgctccaagctgggctgtgtgcacgaaccccccgttcagcccgaccgctgcgccttatccggtaactatcgtcttgagtccaacccggtaagacacgacttatcgccactggcagcagccactggtaacaggattagcagagcgaggtatgtaggcggtgctacagagttcttgaagtggtggcctaactacggctacactagaagaacagtatttggtatctgcgctctgctgaagccagttaccttcggaaaaagagttggtagctcttgatccggcaaacaaaccaccgctggtagcggtggtttttttgtttgcaagcagcagattacgcgcagaaaaaaaggatctcaagaagatccttttaaaaaaattcatccaacaaacgataaaatgcaatacgttgactatctggtgctgcaataccatataaaactaaaaaacgatctgcccattcaccacctaattcttctgcaatatcacgagttgctaatgcaatatcttgataacgatctgcaacacctaaacgaccacaatcaatgaaaccactaaaacgaccattttcaaccataatatttggtaaacatgcatcaccatgagtaacaactaaatcttcaccatctggcatacttgcttttaaacgtgcaaacaattctgctggtgctaaaccttgatgttcttcatctaaatcatcttgatcaactaaacctgcttccatacgagtacgtgcacgttcaatacgatgttttgcttgatgatcaaatggacaagttgctggatctaaagtatgtaaacgacgcattgcatctgccataatactaactttttctgctggtgctaaatgactagataacaaatcttgacctggaacttcacctaacaacaaccaatcacgacctgcttcagtaacaacatctaaaactgctgcacatggaacaccagtagttgctaaccaacttaaacgtgctgcttcatcttgtaattcatttaatgcaccacttaaatcagttttaacaaacaaaactggacgaccttgtgcacttaaacgaaaaactgctgcatcagaacaaccaatagtttgttgtgcccaatcataaccaaacaaacgttcaacccatgctgctggactacctgcatgtaaaccatcttgttcaatcatactcttcctttttcaatattattgaagcatttatcagggttattgtctcatgagcggatacatatttgaagaattcacattgattattgactagttattaatagtaatcaattacggggtcattagttcatagcccatatatggagttccgcgttacataacttacggtaaatggcccgcctggctgaccgcccaacgacccccgcccattgacgtcaataatgacgtatgttcccatagtaacgccaatagggactttccattgacgtcaatgggtggagtatttacggtaaactgcccacttggcagtacatcaagtgtatcatatgccaagtacgccccctattgacgtcaatgacggtaaatggcccgcctggcattatgcccagtacatgaccttatgggactttcctacttggcagtacatctacgtattagtcatcgctattaccatggtgatgcggttttggcagtacatcaatgggcgtggatagcggtttgactcacggggatttccaagtctccaccccattgacgtcaatgggagtttgttttggcaccaaaatcaacgggactttccaaaatgtcgtaacaactccgccccattgacgcaaatgggcggtaggcgtgtacggtgggaggtctatataagcagagctctctggctaactagagaacccactgcttactggcttatcgaaattaatacgactcactatagggagacccaagctggctagcgtttaaacttaagcttggtaccttatcaaactgatgagtccgtgaggacgaaacgagtaagctcgtctttgaaatggggggctgggccctgatgcccagtccttcctttccccttccggggggttaaccggctgtgtttgctagaggcacagaggggcaacatccaacctgcttttgcggggaacggtgcggctccgattcctgcgtcgccaaaggtgttagcgcacccaaacggcgcacctaccaatgttattggtgtggtctgcgagttctagcctactcgtttctcccccgaccattcactcacccacgaaaagtgtgttgtaaccataagatttaacccccgcacgggatgtgcgataaccgtaagactggctcaagcgcggaaagcgctgtaaccacatgctgttagtccctttatggctgcaagatggctacccacctcggatcactgaactggagctcgaccctccttagtaagggaaccgagaggccttcgtgcaacaagctccgacacagagtccacgtgactgctaccaccatgagtacatggttctcccctctcgacccaggacttctttttgaatatccacggctcgatccagagggtggggcatgacccctagcatagcgagctacagcgggaactgtagctaggccttagcgtgccttggatactgcctgatagggcgacggcctagtcgtgtcggttctataggtagcacatacaaatatgcagaactctcatttttctttcgatacagcctctggcacctttgaagatgtaaccggaacaaaagtcaagatcgttgaataccccagatcggtgaacaatggtgtttacgattcgtctactcatttggagatactgaacctacagggtgaaattgaaattttaaggtctttcaatgaataccaaattcgcgccgccaaacaacaactcggactggacatcgtgtacgaactacagggtaatgttcagacaacgtcaaagaatgattttgattcccgtggcaataatggtaacatgaccttcaattactacgcaaacacttatcagaattcagtagacttctcgacctcctcgtcggcgtcaggcgccggacctgggaactctcggggcggattagcgggtctcctcacaaatttcagtggaatcttgaaccctcttggctacctcaaagatcacaacaccgaagaaatggaaaactctgctgatcgagtcacaacgcaaacggcgggcaacactgccataaacacgcaatcatcattgggtgtgttgtgtgcctacgttgaagacccgaccaaatctgatcctccgtccagctctggcgatatcgagaccaatcccgggccgatgtacaggatgcaactcctgtcttgcattgcactaagtcttgcacttgtcacgaattcacaggtgcagctccagcagagtggcgcagagctcgctcgcccaggcgcttctgtgaatctgagttgtaaggcctccggatatacttttacgaacaacggcatcaactggctgaagcagcggaccggccagggcctggagtggatcggcgaaatatacccccggtccacaaacactctctataacgagaagtttaagggcaaagcaactctgaccgcggacaggtcctctaacacagcctatatggagctgagaagcttgacgagtgaggactccgctgtctatttttgcgcccgaactctgaccgctccttttgctttttggggccagggcacgctcgtgaccgtaagtgcgggctccactagcggttccggcaaacctggcagcggagaaggcagcaccaaagggcagatcgtcctgacgcagtctccagccatcatgagcgcctcacccggcgaaaaggtgaccatgacctgctcagcctcttctggtgtgaatttcatgcactggtaccagcaaaaaagtgggacctcccctaaaaggtggatcttcgataccagcaaactggcttctggcgttcccgcaaggtttagcggctctggttccggcacatcatacagcctgacgatcagcagcatggaggcagaagacgcagctacctattactgccagcaatggagctttaacccacctactttcggaggaggaacaaagctggaaataaaaagaggtggtggtggatcagaggtgcagctggtggagtctgggggaggcttggtgcagcctggaaagtccctgaaactctcctgtgaggcctctggattcaccttcagcggctatggcatgcactgggtccgccaggctccagggagggggctggagtcggtcgcatacattactagtagtagtattaatatcaaatatgctgacgctgtgaaaggccggttcaccgtctccagagacaatgccaagaacttactgtttctacaaatgaacattctcaagtctgaggacacagccatgtactactgtgcaagattcgactgggacaaaaattactggggccaaggaaccatggtcaccgtctcctcaggtggtggtggatcaggtggaggcggaagtggaggtggcggatccgacatccagatgacccagtctccatcatcactgcctgcctccctgggagacagagtcactatcaattgtcaggccagtcaggacattagcaattatttaaactggtaccagcagaaaccagggaaagctcctaagctcctgatctattatacaaataaattggcagatggagtcccatcaaggttcagtggcagtggttctgggagagattcttctttcactatcagcagcctggaatccgaagatattggatcttattactgtcaacagtattataactatccgtggacgttcggacctggcaccaagctggaaatcaaacggcaccaccatcatcaccacagaaggaaaagggaaggcaggggatccctcctgacatgtggagatgtggaagagaatcctggtccaatgaacccaagtgctgccgtcattttctgcctcatcctgctgggtctgagtgggactcaagggatccctctcgcaaggacggtccgctgcaactgcatccatatcgatgacgggccagtgagaatgagggccatagggaagcttgaaatcatccctgcgagcctatcctgcccacgtgttgagatcattgccacgatgaaaaagaatgatgagcagagatgtctgaatccggaatctaagaccatcaagaatttaatgaaagcgtttagccaaaaaaggtctaaaagggctcctgagggcagaggaagtctgctaacatgcggtgacgtcgaggagaatcccgggcctgcttctgacaacccaattttggagtttcttgaagcagaaaatgatctagtcactctggcctctctctggaagatggtgcactctgttcaacagacctggagaaagtatgtgaagaacgatgatttttggcccaatttactcagcgagctagtgggggaaggctctgtcgccttggccgccacgctatccaaccaagcttcagtaaaggctcttttgggcctgcactttctctctcgggggctcaattacactgacttttactctttactgatagagaaatgctctagtttctttaccgtagaaccacctcctccaccagctgaaaacctgatgaccaagccctcagtgaagtcgaaattccgaaaactgtttaagatgcaaggacccatggacaaagtcaaagactggaaccaaatagctgccggcttgaagaattttcaatttgttcgtgacctagtcaaagaggtggtcgattggctgcaggcctggatcaacaaagagaaagccagccctgtcctccagtaccagttggagatgaagaagctcgggcctgtggccttggctcatgacgctttcatggctggttccgggccccctcttagcgacgaccagattgaatacctccagaacctcaaatctcttgccctaacactggggaagactaatttggcccaaagtctcaccactatgatcaatgccaaacaaagttcagcccaacgagttgaacccgttgtggtggtccttagaggcaagccgggatgcggcaagagcttggcctctacgttgattgcccaggctgtgtccaagcgcctctatggctcccaaagtgtatattctcttcccccagatccagatttcttcgatggatacaaaggacagttcgtgaccttgatggatgatttgggacaaaacccggatggacaagatttctccaccttttgtcagatggtgtcgaccgcccaatttctccccaacatggcggaccttgcagagaaagggcgtccctttacctccaatctcatcattgcaactacaaatctcccccacttcagtcctgtcaccattgctgatccttctgcagtctctcgccgtatcaactacgatctgactctagaagtatctgaggcctacaagaaacacacacggctgaattttgacttggctttcaggcgcacagacgccccccccatttatccttttgctgcccatgtgccctttgtggacgtagctgtgcgcttcaaaaatggtcaccagaattttaatctcctagagttggtcgattccatttgtacagacattcgagccaagcaacaaggtgcccgaaacatgcagactctggttctacagagccccaacgagaatgatgacacccccgtcgacgaggcgttgggtagagttctctcccccgctgcggtcgatgaggcgcttgtcgacctcactccagaggccgacccggttggccgtttggctattcttgccaagctaggtcttgccctagctgcggtcacccctggtctgataatcttggcagtgggactctacaggtacttctctggctctgatgcagaccaagaagaaacagaaagtgagggatctgtcaaggcacccaggagcgaaaatgcttatgacggcccgaagaaaaactctaagccccctggagcactctctctcatggaaatgcaacagcccaacgtggacatgggctttgaggctgcggtcgctaagaaagtggtcgtccccattaccttcatggttcccaacagaccttctgggcttacacagtccgctcttctggtgaccggccggaccttcctaatcaatgaacatacatggtccaatccctcctggaccagcttcacaatccgcggtgaggtacacactcgtgatgagcccttccaaacggttcatttcactcaccacggtattcccacagatctgatgatggtacgtctcggaccgggcaattctttccctaacaatctagacaagtttggacttgaccagatgccggcacgcaactcccgtgtggttggcgtttcgtccagttacggaaacttcttcttctctggaaatttcctcggatttgttgattccatcacctctgaacaaggaacttacgcaagactctttaggtacagggtgacgacctacaaaggatggtgcggctcggccctggtctgtgaggccggtggcgtccgacgcatcattggcctgcattctgctggcgccgccggtatcggcgccgggacctatatctcaaaattaggactaatcaaagccctgaaacacctcggtgaacctttggccacaatgcaaggactgatgactgaattagagcctggaatcaccgtacatgtaccccggaaatccaaattgagaaagacgaccgcacacgcggtgtacaaaccggagtttgagcctgctgtgttgtcaaaatttgatcccagactgaacaaggatgttgacttggatgaagtaatttggtctaaacacactgccaatgtcccttaccaacctcctttgttctacacatacatgtcagagtacgctcatcgagtcttctccttcttggggaaagacaatgacattctgaccgtcaaagaagcaattctgggcatccccggactagaccccatggatccccacacagctccgggtctgccttacgccatcaacggccttcgacgtactgatctcgtcgattttgtgaacggtacagtagatgcggcgctggctgtacaaatccagaaattcttagacggtgactactctgaccatgtcttccaaacttttctgaaagatgagatcagaccctcagagaaagtccgagcgggaaaaacccgcattgttgatgtgccctccctggcgcattgcattgtgggcagaatgttgcttgggcgctttgctgccaagtttcaatcccatcctggctttctcctcggctctgctatcgggtctgaccctgatgttttctggaccgtcataggggctcaactcgaggggagaaagaacacgtatgacgtggactacagtgcctttgactcttcacacggcactggctccttcgaggctctcatctctcactttttcaccgtggacaatggttttagccctgcgctgggaccgtatctcagatccctggctgtctcggtgcacgcttacggcgagcgtcgcatcaagattaccggtggcctcccctccggttgtgccgcgaccagcctgctgaacacagtgctcaacaatgtgatcatcaggactgctctggcattgacttacaaggaatttgaatatgacatggttgatatcatcgcctacggtgacgaccttctggttggcacggattacgatctggacttcaatgaggtggcacgacgcgctgccaagttggggtataagatgactcctgccaacaagggttctgtcttccctccgacttcctctctttccgatgctgtttttctaaagcgcaaattcgtccaaaacaacgacggcttatacaaaccagttatggatttaaagaatttggaagccatgctctcctacttcaaaccaggaacactactcgagaagctgcaatctgtttctatgttggctcaacattctggaaaagaagaatatgatagattgatgcaccccttcgctgactacggtgccgtaccgagtcacgagtacctgcaggcaagatggagggccttgttcgactgacccagatagcccaaggcgcttcggtgctgccggcgattctgggagaactcagtcggaacagaaaagggaaaaaaaaaaaaaaaaaaaaaaaaaaaaaaggccggcatggtcccagcctcctcgctggcgccggctgggcaacatgcttcggcatggcgaatgggacgcggccgctcgagtctagagggcccgtttaaacccgctgatcagcctcgactgtgccttctagttgccagccatctgttgtttgcccctcccccgtgccttccttgaccctggaaggtgccactcccactgtcctttcctaataaaatgaggaaattgcatcgcattgtctgagtaggtgtcattctattctggggggtggggtggggcaggacagcaagggggaggattgggaagacaatagcaggcatgctggggatgcggtgggctctatggtgctggcgtttttccataggctc

SEQ ID NO: 44 - RNA, 7043 nt, Artificial Sequence
  SVV-Trunc10m FAP CD3 BiTE 6His T2Av2-CXCL10 RNA
uuugaaauggggggcugggcccugaugcccaguccuuccuuuccccuuccgggggguuaaccggcuguguuugcuagaggcacagaggggcaacauccaaccugcuuuugcggggaacggugcggcuccgauuccugcgucgccaaagguguuagcgcacccaaacggcgcaccuaccaauguuauugguguggucugcgaguucuagccuacucguuucucccccgaccauucacucacccacgaaaaguguguuguaaccauaagauuuaacccccgcacgggaugugcgauaaccguaagacuggcucaagcgcggaaagcgcuguaaccacaugcuguuagucccuuuauggcugcaagauggcuacccaccucggaucacugaacuggagcucgacccuccuuaguaagggaaccgagaggccuucgugcaacaagcuccgacacagaguccacgugacugcuaccaccaugaguacaugguucuccccucucgacccaggacuucuuuuugaauauccacggcucgauccagaggguggggcaugaccccuagcauagcgagcuacagcgggaacuguagcuaggccuuagcgugccuuggauacugccugauagggcgacggccuagucgugucgguucuauagguagcacauacaaauaugcagaacucucauuuuucuuucgauacagccucuggcaccuuugaagauguaaccggaacaaaagucaagaucguugaauaccccagaucggugaacaaugguguuuacgauucgucuacucauuuggagauacugaaccuacagggugaaauugaaauuuuaaggucuuucaaugaauaccaaauucgcgccgccaaacaacaacucggacuggacaucguguacgaacuacaggguaauguucagacaacgucaaagaaugauuuugauucccguggcaauaaugguaacaugaccuucaauuacuacgcaaacacuuaucagaauucaguagacuucucgaccuccucgucggcgucaggcgccggaccugggaacucucggggcggauuagcgggucuccucacaaauuucaguggaaucuugaacccucuuggcuaccucaaagaucacaacaccgaagaaauggaaaacucugcugaucgagucacaacgcaaacggcgggcaacacugccauaaacacgcaaucaucauuggguguguugugugccuacguugaagacccgaccaaaucugauccuccguccagcucuggcgauaucgagaccaaucccgggccgauguacaggaugcaacuccugucuugcauugcacuaagucuugcacuugucacgaauucacaggugcagcuccagcagaguggcgcagagcucgcucgcccaggcgcuucugugaaucugaguuguaaggccuccggauauacuuuuacgaacaacggcaucaacuggcugaagcagcggaccggccagggccuggaguggaucggcgaaauauacccccgguccacaaacacucucuauaacgagaaguuuaagggcaaagcaacucugaccgcggacagguccucuaacacagccuauauggagcugagaagcuugacgagugaggacuccgcugucuauuuuugcgcccgaacucugaccgcuccuuuugcuuuuuggggccagggcacgcucgugaccguaagugcgggcuccacuagcgguuccggcaaaccuggcagcggagaaggcagcaccaaagggcagaucguccugacgcagucuccagccaucaugagcgccucacccggcgaaaaggugaccaugaccugcucagccucuucuggugugaauuucaugcacugguaccagcaaaaaagugggaccuccccuaaaagguggaucuucgauaccagcaaacuggcuucuggcguucccgcaagguuuagcggcucugguuccggcacaucauacagccugacgaucagcagcauggaggcagaagacgcagcuaccuauuacugccagcaauggagcuuuaacccaccuacuuucggaggaggaacaaagcuggaaauaaaaagagguggugguggaucagaggugcagcugguggagucugggggaggcuuggugcagccuggaaagucccugaaacucuccugugaggccucuggauucaccuucagcggcuauggcaugcacuggguccgccaggcuccagggagggggcuggagucggucgcauacauuacuaguaguaguauuaauaucaaauaugcugacgcugugaaaggccgguucaccgucuccagagacaaugccaagaacuuacuguuucuacaaaugaacauucucaagucugaggacacagccauguacuacugugcaagauucgacugggacaaaaauuacuggggccaaggaaccauggucaccgucuccucagguggugguggaucagguggaggcggaaguggagguggcggauccgacauccagaugacccagucuccaucaucacugccugccucccugggagacagagucacuaucaauugucaggccagucaggacauuagcaauuauuuaaacugguaccagcagaaaccagggaaagcuccuaagcuccugaucuauuauacaaauaaauuggcagauggagucccaucaagguucaguggcagugguucugggagagauucuucuuucacuaucagcagccuggaauccgaagauauuggaucuuauuacugucaacaguauuauaacuauccguggacguucggaccuggcaccaagcuggaaaucaaacggcaccaccaucaucaccacagaaggaaaagggaaggcaggggaucccuccugacauguggagauguggaagagaauccugguccaaugaacccaagugcugccgucauuuucugccucauccugcugggucugagugggacucaagggaucccucucgcaaggacgguccgcugcaacugcauccauaucgaugacgggccagugagaaugagggccauagggaagcuugaaaucaucccugcgagccuauccugcccacguguugagaucauugccacgaugaaaaagaaugaugagcagagaugucugaauccggaaucuaagaccaucaagaauuuaaugaaagcguuuagccaaaaaaggucuaaaagggcuccugagggcagaggaagucugcuaacaugcggugacgucgaggagaaucccgggccugcuucugacaacccaauuuuggaguuucuugaagcagaaaaugaucuagucacucuggccucucucuggaagauggugcacucuguucaacagaccuggagaaaguaugugaagaacgaugauuuuuggcccaauuuacucagcgagcuagugggggaaggcucugucgccuuggccgccacgcuauccaaccaagcuucaguaaaggcucuuuugggccugcacuuucucucucgggggcucaauuacacugacuuuuacucuuuacugauagagaaaugcucuaguuucuuuaccguagaaccaccuccuccaccagcugaaaaccugaugaccaagcccucagugaagucgaaauuccgaaaacuguuuaagaugcaaggacccauggacaaagucaaagacuggaaccaaauagcugccggcuugaagaauuuucaauuuguucgugaccuagucaaagagguggucgauuggcugcaggccuggaucaacaaagagaaagccagcccuguccuccaguaccaguuggagaugaagaagcucgggccuguggccuuggcucaugacgcuuucauggcugguuccgggcccccucuuagcgacgaccagauugaauaccuccagaaccucaaaucucuugcccuaacacuggggaagacuaauuuggcccaaagucucaccacuaugaucaaugccaaacaaaguucagcccaacgaguugaacccguuguggugguccuuagaggcaagccgggaugcggcaagagcuuggccucuacguugauugcccaggcuguguccaagcgccucuauggcucccaaaguguauauucucuucccccagauccagauuucuucgauggauacaaaggacaguucgugaccuugauggaugauuugggacaaaacccggauggacaagauuucuccaccuuuugucagauggugucgaccgcccaauuucuccccaacauggcggaccuugcagagaaagggcgucccuuuaccuccaaucucaucauugcaacuacaaaucucccccacuucaguccugucaccauugcugauccuucugcagucucucgccguaucaacuacgaucugacucuagaaguaucugaggccuacaagaaacacacacggcugaauuuugacuuggcuuucaggcgcacagacgccccccccauuuauccuuuugcugcccaugugcccuuuguggacguagcugugcgcuucaaaaauggucaccagaauuuuaaucuccuagaguuggucgauuccauuuguacagacauucgagccaagcaacaaggugcccgaaacaugcagacucugguucuacagagccccaacgagaaugaugacacccccgucgacgaggcguuggguagaguucucucccccgcugcggucgaugaggcgcuugucgaccucacuccagaggccgacccgguuggccguuuggcuauucuugccaagcuaggucuugcccuagcugcggucaccccuggucugauaaucuuggcagugggacucuacagguacuucucuggcucugaugcagaccaagaagaaacagaaagugagggaucugucaaggcacccaggagcgaaaaugcuuaugacggcccgaagaaaaacucuaagcccccuggagcacucucucucauggaaaugcaacagcccaacguggacaugggcuuugaggcugcggucgcuaagaaaguggucguccccauuaccuucaugguucccaacagaccuucugggcuuacacaguccgcucuucuggugaccggccggaccuuccuaaucaaugaacauacaugguccaaucccuccuggaccagcuucacaauccgcggugagguacacacucgugaugagcccuuccaaacgguucauuucacucaccacgguauucccacagaucugaugaugguacgucucggaccgggcaauucuuucccuaacaaucuagacaaguuuggacuugaccagaugccggcacgcaacucccgugugguuggcguuucguccaguuacggaaacuucuucuucucuggaaauuuccucggauuuguugauuccaucaccucugaacaaggaacuuacgcaagacucuuuagguacagggugacgaccuacaaaggauggugcggcucggcccuggucugugaggccgguggcguccgacgcaucauuggccugcauucugcuggcgccgccgguaucggcgccgggaccuauaucucaaaauuaggacuaaucaaagcccugaaacaccucggugaaccuuuggccacaaugcaaggacugaugacugaauuagagccuggaaucaccguacauguaccccggaaauccaaauugagaaagacgaccgcacacgcgguguacaaaccggaguuugagccugcuguguugucaaaauuugaucccagacugaacaaggauguugacuuggaugaaguaauuuggucuaaacacacugccaaugucccuuaccaaccuccuuuguucuacacauacaugucagaguacgcucaucgagucuucuccuucuuggggaaagacaaugacauucugaccgucaaagaagcaauucugggcauccccggacuagaccccauggauccccacacagcuccgggucugccuuacgccaucaacggccuucgacguacugaucucgucgauuuugugaacgguacaguagaugcggcgcuggcuguacaaauccagaaauucuuagacggugacuacucugaccaugucuuccaaacuuuucugaaagaugagaucagacccucagagaaaguccgagcgggaaaaacccgcauuguugaugugcccucccuggcgcauugcauugugggcagaauguugcuugggcgcuuugcugccaaguuucaaucccauccuggcuuucuccucggcucugcuaucgggucugacccugauguuuucuggaccgucauaggggcucaacucgaggggagaaagaacacguaugacguggacuacagugccuuugacucuucacacggcacuggcuccuucgaggcucucaucucucacuuuuucaccguggacaaugguuuuagcccugcgcugggaccguaucucagaucccuggcugucucggugcacgcuuacggcgagcgucgcaucaagauuaccgguggccuccccuccgguugugccgcgaccagccugcugaacacagugcucaacaaugugaucaucaggacugcucuggcauugacuuacaaggaauuugaauaugacaugguugauaucaucgccuacggugacgaccuucugguuggcacggauuacgaucuggacuucaaugagguggcacgacgcgcugccaaguugggguauaagaugacuccugccaacaaggguucugucuucccuccgacuuccucucuuuccgaugcuguuuuucuaaagcgcaaauucguccaaaacaacgacggcuuauacaaaccaguuauggauuuaaagaauuuggaagccaugcucuccuacuucaaaccaggaacacuacucgagaagcugcaaucuguuucuauguuggcucaacauucuggaaaagaagaauaugauagauugaugcaccccuucgcugacuacggugccguaccgagucacgaguaccugcaggcaagauggagggccuuguucgacugacccagauagcccaaggcgcuucggugcugccggcgauucugggagaacucagucggaacagaaaagggaaaaaaaaaaaaaaaaaaaaaaaaaaaaaa

SEQ ID NO: 45 - DNA, 9556 bp, Artificial Sequence
  SVV-Trunc10m FAP CD3 BiTE 6His 3C-CXCL10
cgcccccctgacgagcatcacaaaaatcgacgctcaagtcagaggtggcgaaacccgacaggactataaagataccaggcgtttccccctggaagctccctcgtgcgctctcctgttccgaccctgccgcttaccggatacctgtccgcctttctcccttcgggaagcgtggcgctttctcatagctcacgctgtaggtatctcagttcggtgtaggtcgttcgctccaagctgggctgtgtgcacgaaccccccgttcagcccgaccgctgcgccttatccggtaactatcgtcttgagtccaacccggtaagacacgacttatcgccactggcagcagccactggtaacaggattagcagagcgaggtatgtaggcggtgctacagagttcttgaagtggtggcctaactacggctacactagaagaacagtatttggtatctgcgctctgctgaagccagttaccttcggaaaaagagttggtagctcttgatccggcaaacaaaccaccgctggtagcggtggtttttttgtttgcaagcagcagattacgcgcagaaaaaaaggatctcaagaagatccttttaaaaaaattcatccaacaaacgataaaatgcaatacgttgactatctggtgctgcaataccatataaaactaaaaaacgatctgcccattcaccacctaattcttctgcaatatcacgagttgctaatgcaatatcttgataacgatctgcaacacctaaacgaccacaatcaatgaaaccactaaaacgaccattttcaaccataatatttggtaaacatgcatcaccatgagtaacaactaaatcttcaccatctggcatacttgcttttaaacgtgcaaacaattctgctggtgctaaaccttgatgttcttcatctaaatcatcttgatcaactaaacctgcttccatacgagtacgtgcacgttcaatacgatgttttgcttgatgatcaaatggacaagttgctggatctaaagtatgtaaacgacgcattgcatctgccataatactaactttttctgctggtgctaaatgactagataacaaatcttgacctggaacttcacctaacaacaaccaatcacgacctgcttcagtaacaacatctaaaactgctgcacatggaacaccagtagttgctaaccaacttaaacgtgctgcttcatcttgtaattcatttaatgcaccacttaaatcagttttaacaaacaaaactggacgaccttgtgcacttaaacgaaaaactgctgcatcagaacaaccaatagtttgttgtgcccaatcataaccaaacaaacgttcaacccatgctgctggactacctgcatgtaaaccatcttgttcaatcatactcttcctttttcaatattattgaagcatttatcagggttattgtctcatgagcggatacatatttgaagaattcacattgattattgactagttattaatagtaatcaattacggggtcattagttcatagcccatatatggagttccgcgttacataacttacggtaaatggcccgcctggctgaccgcccaacgacccccgcccattgacgtcaataatgacgtatgttcccatagtaacgccaatagggactttccattgacgtcaatgggtggagtatttacggtaaactgcccacttggcagtacatcaagtgtatcatatgccaagtacgccccctattgacgtcaatgacggtaaatggcccgcctggcattatgcccagtacatgaccttatgggactttcctacttggcagtacatctacgtattagtcatcgctattaccatggtgatgcggttttggcagtacatcaatgggcgtggatagcggtttgactcacggggatttccaagtctccaccccattgacgtcaatgggagtttgttttggcaccaaaatcaacgggactttccaaaatgtcgtaacaactccgccccattgacgcaaatgggcggtaggcgtgtacggtgggaggtctatataagcagagctctctggctaactagagaacccactgcttactggcttatcgaaattaatacgactcactatagggagacccaagctggctagcgtttaaacttaagcttggtaccttatcaaactgatgagtccgtgaggacgaaacgagtaagctcgtctttgaaatggggggctgggccctgatgcccagtccttcctttccccttccggggggttaaccggctgtgtttgctagaggcacagaggggcaacatccaacctgcttttgcggggaacggtgcggctccgattcctgcgtcgccaaaggtgttagcgcacccaaacggcgcacctaccaatgttattggtgtggtctgcgagttctagcctactcgtttctcccccgaccattcactcacccacgaaaagtgtgttgtaaccataagatttaacccccgcacgggatgtgcgataaccgtaagactggctcaagcgcggaaagcgctgtaaccacatgctgttagtccctttatggctgcaagatggctacccacctcggatcactgaactggagctcgaccctccttagtaagggaaccgagaggccttcgtgcaacaagctccgacacagagtccacgtgactgctaccaccatgagtacatggttctcccctctcgacccaggacttctttttgaatatccacggctcgatccagagggtggggcatgacccctagcatagcgagctacagcgggaactgtagctaggccttagcgtgccttggatactgcctgatagggcgacggcctagtcgtgtcggttctataggtagcacatacaaatatgcagaactctcatttttctttcgatacagcctctggcacctttgaagatgtaaccggaacaaaagtcaagatcgttgaataccccagatcggtgaacaatggtgtttacgattcgtctactcatttggagatactgaacctacagggtgaaattgaaattttaaggtctttcaatgaataccaaattcgcgccgccaaacaacaactcggactggacatcgtgtacgaactacagggtaatgttcagacaacgtcaaagaatgattttgattcccgtggcaataatggtaacatgaccttcaattactacgcaaacacttatcagaattcagtagacttctcgacctcctcgtcggcgtcaggcgccggacctgggaactctcggggcggattagcgggtctcctcacaaatttcagtggaatcttgaaccctcttggctacctcaaagatcacaacaccgaagaaatggaaaactctgctgatcgagtcacaacgcaaacggcgggcaacactgccataaacacgcaatcatcattgggtgtgttgtgtgcctacgttgaagacccgaccaaatctgatcctccgtccagctctggcgatatcgagaccaatcccgggccgatgtacaggatgcaactcctgtcttgcattgcactaagtcttgcacttgtcacgaattcacaggtgcagctccagcagagtggcgcagagctcgctcgcccaggcgcttctgtgaatctgagttgtaaggcctccggatatacttttacgaacaacggcatcaactggctgaagcagcggaccggccagggcctggagtggatcggcgaaatatacccccggtccacaaacactctctataacgagaagtttaagggcaaagcaactctgaccgcggacaggtcctctaacacagcctatatggagctgagaagcttgacgagtgaggactccgctgtctatttttgcgcccgaactctgaccgctccttttgctttttggggccagggcacgctcgtgaccgtaagtgcgggctccactagcggttccggcaaacctggcagcggagaaggcagcaccaaagggcagatcgtcctgacgcagtctccagccatcatgagcgcctcacccggcgaaaaggtgaccatgacctgctcagcctcttctggtgtgaatttcatgcactggtaccagcaaaaaagtgggacctcccctaaaaggtggatcttcgataccagcaaactggcttctggcgttcccgcaaggtttagcggctctggttccggcacatcatacagcctgacgatcagcagcatggaggcagaagacgcagctacctattactgccagcaatggagctttaacccacctactttcggaggaggaacaaagctggaaataaaaagaggtggtggtggatcagaggtgcagctggtggagtctgggggaggcttggtgcagcctggaaagtccctgaaactctcctgtgaggcctctggattcaccttcagcggctatggcatgcactgggtccgccaggctccagggagggggctggagtcggtcgcatacattactagtagtagtattaatatcaaatatgctgacgctgtgaaaggccggttcaccgtctccagagacaatgccaagaacttactgtttctacaaatgaacattctcaagtctgaggacacagccatgtactactgtgcaagattcgactgggacaaaaattactggggccaaggaaccatggtcaccgtctcctcaggtggtggtggatcaggtggaggcggaagtggaggtggcggatccgacatccagatgacccagtctccatcatcactgcctgcctccctgggagacagagtcactatcaattgtcaggccagtcaggacattagcaattatttaaactggtaccagcagaaaccagggaaagctcctaagctcctgatctattatacaaataaattggcagatggagtcccatcaaggttcagtggcagtggttctgggagagattcttctttcactatcagcagcctggaatccgaagatattggatcttattactgtcaacagtattataactatccgtggacgttcggacctggcaccaagctggaaatcaaacggcaccaccatcatcaccacatcgtgtacgaactacagggtcccatgaacccaagtgctgccgtcattttctgcctcatcctgctgggtctgagtgggactcaagggatccctctcgcaaggacggtccgctgcaactgcatccatatcgatgacgggccagtgagaatgagggccatagggaagcttgaaatcatccctgcgagcctatcctgcccacgtgttgagatcattgccacgatgaaaaagaatgatgagcagagatgtctgaatccggaatctaagaccatcaagaatttaatgaaagcgtttagccaaaaaaggtctaaaagggctcctgagggcagaggaagtctgctaacatgcggtgacgtcgaggagaatcccgggcctgcttctgacaacccaattttggagtttcttgaagcagaaaatgatctagtcactctggcctctctctggaagatggtgcactctgttcaacagacctggagaaagtatgtgaagaacgatgatttttggcccaatttactcagcgagctagtgggggaaggctctgtcgccttggccgccacgctatccaaccaagcttcagtaaaggctcttttgggcctgcactttctctctcgggggctcaattacactgacttttactctttactgatagagaaatgctctagtttctttaccgtagaaccacctcctccaccagctgaaaacctgatgaccaagccctcagtgaagtcgaaattccgaaaactgtttaagatgcaaggacccatggacaaagtcaaagactggaaccaaatagctgccggcttgaagaattttcaatttgttcgtgacctagtcaaagaggtggtcgattggctgcaggcctggatcaacaaagagaaagccagccctgtcctccagtaccagttggagatgaagaagctcgggcctgtggccttggctcatgacgctttcatggctggttccgggccccctcttagcgacgaccagattgaatacctccagaacctcaaatctcttgccctaacactggggaagactaatttggcccaaagtctcaccactatgatcaatgccaaacaaagttcagcccaacgagttgaacccgttgtggtggtccttagaggcaagccgggatgcggcaagagcttggcctctacgttgattgcccaggctgtgtccaagcgcctctatggctcccaaagtgtatattctcttcccccagatccagatttcttcgatggatacaaaggacagttcgtgaccttgatggatgatttgggacaaaacccggatggacaagatttctccaccttttgtcagatggtgtcgaccgcccaatttctccccaacatggcggaccttgcagagaaagggcgtccctttacctccaatctcatcattgcaactacaaatctcccccacttcagtcctgtcaccattgctgatccttctgcagtctctcgccgtatcaactacgatctgactctagaagtatctgaggcctacaagaaacacacacggctgaattttgacttggctttcaggcgcacagacgccccccccatttatccttttgctgcccatgtgccctttgtggacgtagctgtgcgcttcaaaaatggtcaccagaattttaatctcctagagttggtcgattccatttgtacagacattcgagccaagcaacaaggtgcccgaaacatgcagactctggttctacagagccccaacgagaatgatgacacccccgtcgacgaggcgttgggtagagttctctcccccgctgcggtcgatgaggcgcttgtcgacctcactccagaggccgacccggttggccgtttggctattcttgccaagctaggtcttgccctagctgcggtcacccctggtctgataatcttggcagtgggactctacaggtacttctctggctctgatgcagaccaagaagaaacagaaagtgagggatctgtcaaggcacccaggagcgaaaatgcttatgacggcccgaagaaaaactctaagccccctggagcactctctctcatggaaatgcaacagcccaacgtggacatgggctttgaggctgcggtcgctaagaaagtggtcgtccccattaccttcatggttcccaacagaccttctgggcttacacagtccgctcttctggtgaccggccggaccttcctaatcaatgaacatacatggtccaatccctcctggaccagcttcacaatccgcggtgaggtacacactcgtgatgagcccttccaaacggttcatttcactcaccacggtattcccacagatctgatgatggtacgtctcggaccgggcaattctttccctaacaatctagacaagtttggacttgaccagatgccggcacgcaactcccgtgtggttggcgtttcgtccagttacggaaacttcttcttctctggaaatttcctcggatttgttgattccatcacctctgaacaaggaacttacgcaagactctttaggtacagggtgacgacctacaaaggatggtgcggctcggccctggtctgtgaggccggtggcgtccgacgcatcattggcctgcattctgctggcgccgccggtatcggcgccgggacctatatctcaaaattaggactaatcaaagccctgaaacacctcggtgaacctttggccacaatgcaaggactgatgactgaattagagcctggaatcaccgtacatgtaccccggaaatccaaattgagaaagacgaccgcacacgcggtgtacaaaccggagtttgagcctgctgtgttgtcaaaatttgatcccagactgaacaaggatgttgacttggatgaagtaatttggtctaaacacactgccaatgtcccttaccaacctcctttgttctacacatacatgtcagagtacgctcatcgagtcttctccttcttggggaaagacaatgacattctgaccgtcaaagaagcaattctgggcatccccggactagaccccatggatccccacacagctccgggtctgccttacgccatcaacggccttcgacgtactgatctcgtcgattttgtgaacggtacagtagatgcggcgctggctgtacaaatccagaaattcttagacggtgactactctgaccatgtcttccaaacttttctgaaagatgagatcagaccctcagagaaagtccgagcgggaaaaacccgcattgttgatgtgccctccctggcgcattgcattgtgggcagaatgttgcttgggcgctttgctgccaagtttcaatcccatcctggctttctcctcggctctgctatcgggtctgaccctgatgttttctggaccgtcataggggctcaactcgaggggagaaagaacacgtatgacgtggactacagtgcctttgactcttcacacggcactggctccttcgaggctctcatctctcactttttcaccgtggacaatggttttagccctgcgctgggaccgtatctcagatccctggctgtctcggtgcacgcttacggcgagcgtcgcatcaagattaccggtggcctcccctccggttgtgccgcgaccagcctgctgaacacagtgctcaacaatgtgatcatcaggactgctctggcattgacttacaaggaatttgaatatgacatggttgatatcatcgcctacggtgacgaccttctggttggcacggattacgatctggacttcaatgaggtggcacgacgcgctgccaagttggggtataagatgactcctgccaacaagggttctgtcttccctccgacttcctctctttccgatgctgtttttctaaagcgcaaattcgtccaaaacaacgacggcttatacaaaccagttatggatttaaagaatttggaagccatgctctcctacttcaaaccaggaacactactcgagaagctgcaatctgtttctatgttggctcaacattctggaaaagaagaatatgatagattgatgcaccccttcgctgactacggtgccgtaccgagtcacgagtacctgcaggcaagatggagggccttgttcgactgacccagatagcccaaggcgcttcggtgctgccggcgattctgggagaactcagtcggaacagaaaagggaaaaaaaaaaaaaaaaaaaaaaaaaaaaaaggccggcatggtcccagcctcctcgctggcgccggctgggcaacatgcttcggcatggcgaatgggacgcggccgctcgagtctagagggcccgtttaaacccgctgatcagcctcgactgtgccttctagttgccagccatctgttgtttgcccctcccccgtgccttccttgaccctggaaggtgccactcccactgtcctttcctaataaaatgaggaaattgcatcgcattgtctgagtaggtgtcattctattctggggggtggggtggggcaggacagcaagggggaggattgggaagacaatagcaggcatgctggggatgcggtgggctctatggtgctggcgtttttccataggctc

SEQ ID NO: 46 - RNA, 7001 nt, Artificial Sequence; identical to SEQ ID NO: 40
  SVV-Trunc10m FAP CD3 BiTE 6His 3C-CXCL10 RNA

SEQ ID NO: 47 - DNA, 9592 bp, Artificial Sequence
  SVV-Trunc10m FAP CD3 BiTE 6His E2A-CXC10
cgcccccctgacgagcatcacaaaaatcgacgctcaagtcagaggtggcgaaacccgacaggactataaagataccaggcgtttccccctggaagctccctcgtgcgctctcctgttccgaccctgccgcttaccggatacctgtccgcctttctcccttcgggaagcgtggcgctttctcatagctcacgctgtaggtatctcagttcggtgtaggtcgttcgctccaagctgggctgtgtgcacgaaccccccgttcagcccgaccgctgcgccttatccggtaactatcgtcttgagtccaacccggtaagacacgacttatcgccactggcagcagccactggtaacaggattagcagagcgaggtatgtaggcggtgctacagagttcttgaagtggtggcctaactacggctacactagaagaacagtatttggtatctgcgctctgctgaagccagttaccttcggaaaaagagttggtagctcttgatccggcaaacaaaccaccgctggtagcggtggtttttttgtttgcaagcagcagattacgcgcagaaaaaaaggatctcaagaagatccttttaaaaaaattcatccaacaaacgataaaatgcaatacgttgactatctggtgctgcaataccatataaaactaaaaaacgatctgcccattcaccacctaattcttctgcaatatcacgagttgctaatgcaatatcttgataacgatctgcaacacctaaacgaccacaatcaatgaaaccactaaaacgaccattttcaaccataatatttggtaaacatgcatcaccatgagtaacaactaaatcttcaccatctggcatacttgcttttaaacgtgcaaacaattctgctggtgctaaaccttgatgttcttcatctaaatcatcttgatcaactaaacctgcttccatacgagtacgtgcacgttcaatacgatgttttgcttgatgatcaaatggacaagttgctggatctaaagtatgtaaacgacgcattgcatctgccataatactaactttttctgctggtgctaaatgactagataacaaatcttgacctggaacttcacctaacaacaaccaatcacgacctgcttcagtaacaacatctaaaactgctgcacatggaacaccagtagttgctaaccaacttaaacgtgctgcttcatcttgtaattcatttaatgcaccacttaaatcagttttaacaaacaaaactggacgaccttgtgcacttaaacgaaaaactgctgcatcagaacaaccaatagtttgttgtgcccaatcataaccaaacaaacgttcaacccatgctgctggactacctgcatgtaaaccatcttgttcaatcatactcttcctttttcaatattattgaagcatttatcagggttattgtctcatgagcggatacatatttgaagaattcacattgattattgactagttattaatagtaatcaattacggggtcattagttcatagcccatatatggagttccgcgttacataacttacggtaaatggcccgcctggctgaccgcccaacgacccccgcccattgacgtcaataatgacgtatgttcccatagtaacgccaatagggactttccattgacgtcaatgggtggagtatttacggtaaactgcccacttggcagtacatcaagtgtatcatatgccaagtacgccccctattgacgtcaatgacggtaaatggcccgcctggcattatgcccagtacatgaccttatgggactttcctacttggcagtacatctacgtattagtcatcgctattaccatggtgatgcggttttggcagtacatcaatgggcgtggatagcggtttgactcacggggatttccaagtctccaccccattgacgtcaatgggagtttgttttggcaccaaaatcaacgggactttccaaaatgtcgtaacaactccgccccattgacgcaaatgggcggtaggcgtgtacggtgggaggtctatataagcagagctctctggctaactagagaacccactgcttactggcttatcgaaattaatacgactcactatagggagacccaagctggctagcgtttaaacttaagcttggtaccttatcaaactgatgagtccgtgaggacgaaacgagtaagctcgtctttgaaatggggggctgggccctgatgcccagtccttcctttccccttccggggggttaaccggctgtgtttgctagaggcacagaggggcaacatccaacctgcttttgcggggaacggtgcggctccgattcctgcgtcgccaaaggtgttagcgcacccaaacggcgcacctaccaatgttattggtgtggtctgcgagttctagcctactcgtttctcccccgaccattcactcacccacgaaaagtgtgttgtaaccataagatttaacccccgcacgggatgtgcgataaccgtaagactggctcaagcgcggaaagcgctgtaaccacatgctgttagtccctttatggctgcaagatggctacccacctcggatcactgaactggagctcgaccctccttagtaagggaaccgagaggccttcgtgcaacaagctccgacacagagtccacgtgactgctaccaccatgagtacatggttctcccctctcgacccaggacttctttttgaatatccacggctcgatccagagggtggggcatgacccctagcatagcgagctacagcgggaactgtagctaggccttagcgtgccttggatactgcctgatagggcgacggcctagtcgtgtcggttctataggtagcacatacaaatatgcagaactctcatttttctttcgatacagcctctggcacctttgaagatgtaaccggaacaaaagtcaagatcgttgaataccccagatcggtgaacaatggtgtttacgattcgtctactcatttggagatactgaacctacagggtgaaattgaaattttaaggtctttcaatgaataccaaattcgcgccgccaaacaacaactcggactggacatcgtgtacgaactacagggtaatgttcagacaacgtcaaagaatgattttgattcccgtggcaataatggtaacatgaccttcaattactacgcaaacacttatcagaattcagtagacttctcgacctcctcgtcggcgtcaggcgccggacctgggaactctcggggcggattagcgggtctcctcacaaatttcagtggaatcttgaaccctcttggctacctcaaagatcacaacaccgaagaaatggaaaactctgctgatcgagtcacaacgcaaacggcgggcaacactgccataaacacgcaatcatcattgggtgtgttgtgtgcctacgttgaagacccgaccaaatctgatcctccgtccagctctggcgatatcgagaccaatcccgggccgatgtacaggatgcaactcctgtcttgcattgcactaagtcttgcacttgtcacgaattcacaggtgcagctccagcagagtggcgcagagctcgctcgcccaggcgcttctgtgaatctgagttgtaaggcctccggatatacttttacgaacaacggcatcaactggctgaagcagcggaccggccagggcctggagtggatcggcgaaatatacccccggtccacaaacactctctataacgagaagtttaagggcaaagcaactctgaccgcggacaggtcctctaacacagcctatatggagctgagaagcttgacgagtgaggactccgctgtctatttttgcgcccgaactctgaccgctccttttgctttttggggccagggcacgctcgtgaccgtaagtgcgggctccactagcggttccggcaaacctggcagcggagaaggcagcaccaaagggcagatcgtcctgacgcagtctccagccatcatgagcgcctcacccggcgaaaaggtgaccatgacctgctcagcctcttctggtgtgaatttcatgcactggtaccagcaaaaaagtgggacctcccctaaaaggtggatcttcgataccagcaaactggcttctggcgttcccgcaaggtttagcggctctggttccggcacatcatacagcctgacgatcagcagcatggaggcagaagacgcagctacctattactgccagcaatggagctttaacccacctactttcggaggaggaacaaagctggaaataaaaagaggtggtggtggatcagaggtgcagctggtggagtctgggggaggcttggtgcagcctggaaagtccctgaaactctcctgtgaggcctctggattcaccttcagcggctatggcatgcactgggtccgccaggctccagggagggggctggagtcggtcgcatacattactagtagtagtattaatatcaaatatgctgacgctgtgaaaggccggttcaccgtctccagagacaatgccaagaacttactgtttctacaaatgaacattctcaagtctgaggacacagccatgtactactgtgcaagattcgactgggacaaaaattactggggccaaggaaccatggtcaccgtctcctcaggtggtggtggatcaggtggaggcggaagtggaggtggcggatccgacatccagatgacccagtctccatcatcactgcctgcctccctgggagacagagtcactatcaattgtcaggccagtcaggacattagcaattatttaaactggtaccagcagaaaccagggaaagctcctaagctcctgatctattatacaaataaattggcagatggagtcccatcaaggttcagtggcagtggttctgggagagattcttctttcactatcagcagcctggaatccgaagatattggatcttattactgtcaacagtattataactatccgtggacgttcggacctggcaccaagctggaaatcaaacggcaccaccatcatcaccaccagtgcaccaactacgccctgctgaagctggccggcgacgtggagagcaaccccggccccatgaacccaagtgctgccgtcattttctgcctcatcctgctgggtctgagtgggactcaagggatccctctcgcaaggacggtccgctgcaactgcatccatatcgatgacgggccagtgagaatgagggccatagggaagcttgaaatcatccctgcgagcctatcctgcccacgtgttgagatcattgccacgatgaaaaagaatgatgagcagagatgtctgaatccggaatctaagaccatcaagaatttaatgaaagcgtttagccaaaaaaggtctaaaagggctcctgagggcagaggaagtctgctaacatgcggtgacgtcgaggagaatcccgggcctgcttctgacaacccaattttggagtttcttgaagcagaaaatgatctagtcactctggcctctctctggaagatggtgcactctgttcaacagacctggagaaagtatgtgaagaacgatgatttttggcccaatttactcagcgagctagtgggggaaggctctgtcgccttggccgccacgctatccaaccaagcttcagtaaaggctcttttgggcctgcactttctctctcgggggctcaattacactgacttttactctttactgatagagaaatgctctagtttctttaccgtagaaccacctcctccaccagctgaaaacctgatgaccaagccctcagtgaagtcgaaattccgaaaactgtttaagatgcaaggacccatggacaaagtcaaagactggaaccaaatagctgccggcttgaagaattttcaatttgttcgtgacctagtcaaagaggtggtcgattggctgcaggcctggatcaacaaagagaaagccagccctgtcctccagtaccagttggagatgaagaagctcgggcctgtggccttggctcatgacgctttcatggctggttccgggccccctcttagcgacgaccagattgaatacctccagaacctcaaatctcttgccctaacactggggaagactaatttggcccaaagtctcaccactatgatcaatgccaaacaaagttcagcccaacgagttgaacccgttgtggtggtccttagaggcaagccgggatgcggcaagagcttggcctctacgttgattgcccaggctgtgtccaagcgcctctatggctcccaaagtgtatattctcttcccccagatccagatttcttcgatggatacaaaggacagttcgtgaccttgatggatgatttgggacaaaacccggatggacaagatttctccaccttttgtcagatggtgtcgaccgcccaatttctccccaacatggcggaccttgcagagaaagggcgtccctttacctccaatctcatcattgcaactacaaatctcccccacttcagtcctgtcaccattgctgatccttctgcagtctctcgccgtatcaactacgatctgactctagaagtatctgaggcctacaagaaacacacacggctgaattttgacttggctttcaggcgcacagacgccccccccatttatccttttgctgcccatgtgccctttgtggacgtagctgtgcgcttcaaaaatggtcaccagaattttaatctcctagagttggtcgattccatttgtacagacattcgagccaagcaacaaggtgcccgaaacatgcagactctggttctacagagccccaacgagaatgatgacacccccgtcgacgaggcgttgggtagagttctctcccccgctgcggtcgatgaggcgcttgtcgacctcactccagaggccgacccggttggccgtttggctattcttgccaagctaggtcttgccctagctgcggtcacccctggtctgataatcttggcagtgggactctacaggtacttctctggctctgatgcagaccaagaagaaacagaaagtgagggatctgtcaaggcacccaggagcgaaaatgcttatgacggcccgaagaaaaactctaagccccctggagcactctctctcatggaaatgcaacagcccaacgtggacatgggctttgaggctgcggtcgctaagaaagtggtcgtccccattaccttcatggttcccaacagaccttctgggcttacacagtccgctcttctggtgaccggccggaccttcctaatcaatgaacatacatggtccaatccctcctggaccagcttcacaatccgcggtgaggtacacactcgtgatgagcccttccaaacggttcatttcactcaccacggtattcccacagatctgatgatggtacgtctcggaccgggcaattctttccctaacaatctagacaagtttggacttgaccagatgccggcacgcaactcccgtgtggttggcgtttcgtccagttacggaaacttcttcttctctggaaatttcctcggatttgttgattccatcacctctgaacaaggaacttacgcaagactctttaggtacagggtgacgacctacaaaggatggtgcggctcggccctggtctgtgaggccggtggcgtccgacgcatcattggcctgcattctgctggcgccgccggtatcggcgccgggacctatatctcaaaattaggactaatcaaagccctgaaacacctcggtgaacctttggccacaatgcaaggactgatgactgaattagagcctggaatcaccgtacatgtaccccggaaatccaaattgagaaagacgaccgcacacgcggtgtacaaaccggagtttgagcctgctgtgttgtcaaaatttgatcccagactgaacaaggatgttgacttggatgaagtaatttggtctaaacacactgccaatgtcccttaccaacctcctttgttctacacatacatgtcagagtacgctcatcgagtcttctccttcttggggaaagacaatgacattctgaccgtcaaagaagcaattctgggcatccccggactagaccccatggatccccacacagctccgggtctgccttacgccatcaacggccttcgacgtactgatctcgtcgattttgtgaacggtacagtagatgcggcgctggctgtacaaatccagaaattcttagacggtgactactctgaccatgtcttccaaacttttctgaaagatgagatcagaccctcagagaaagtccgagcgggaaaaacccgcattgttgatgtgccctccctggcgcattgcattgtgggcagaatgttgcttgggcgctttgctgccaagtttcaatcccatcctggctttctcctcggctctgctatcgggtctgaccctgatgttttctggaccgtcataggggctcaactcgaggggagaaagaacacgtatgacgtggactacagtgcctttgactcttcacacggcactggctccttcgaggctctcatctctcactttttcaccgtggacaatggttttagccctgcgctgggaccgtatctcagatccctggctgtctcggtgcacgcttacggcgagcgtcgcatcaagattaccggtggcctcccctccggttgtgccgcgaccagcctgctgaacacagtgctcaacaatgtgatcatcaggactgctctggcattgacttacaaggaatttgaatatgacatggttgatatcatcgcctacggtgacgaccttctggttggcacggattacgatctggacttcaatgaggtggcacgacgcgctgccaagttggggtataagatgactcctgccaacaagggttctgtcttccctccgacttcctctctttccgatgctgtttttctaaagcgcaaattcgtccaaaacaacgacggcttatacaaaccagttatggatttaaagaatttggaagccatgctctcctacttcaaaccaggaacactactcgagaagctgcaatctgtttctatgttggctcaacattctggaaaagaagaatatgatagattgatgcaccccttcgctgactacggtgccgtaccgagtcacgagtacctgcaggcaagatggagggccttgttcgactgacccagatagcccaaggcgcttcggtgctgccggcgattctgggagaactcagtcggaacagaaaagggaaaaaaaaaaaaaaaaaaaaaaaaaaaaaaggccggcatggtcccagcctcctcgctggcgccggctgggcaacatgcttcggcatggcgaatgggacgcggccgctcgagtctagagggcccgtttaaacccgctgatcagcctcgactgtgccttctagttgccagccatctgttgtttgcccctcccccgtgccttccttgaccctggaaggtgccactcccactgtcctttcctaataaaatgaggaaattgcatcgcattgtctgagtaggtgtcattctattctggggggtggggtggggcaggacagcaagggggaggattgggaagacaatagcaggcatgctggggatgcggtgggctctatggtgctggcgtttttccataggctc

SEQ ID NO: 48 - RNA, 7037 nt, Artificial Sequence
  SVV-Trunc10m FAP CD3 BiTE 6His E2A-CXC10 RNA
uuugaaauggggggcugggcccugaugcccaguccuuccuuuccccuuccgggggguuaaccggcuguguuugcuagaggcacagaggggcaacauccaaccugcuuuugcggggaacggugcggcuccgauuccugcgucgccaaagguguuagcgcacccaaacggcgcaccuaccaauguuauugguguggucugcgaguucuagccuacucguuucucccccgaccauucacucacccacgaaaaguguguuguaaccauaagauuuaacccccgcacgggaugugcgauaaccguaagacuggcucaagcgcggaaagcgcuguaaccacaugcuguuagucccuuuauggcugcaagauggcuacccaccucggaucacugaacuggagcucgacccuccuuaguaagggaaccgagaggccuucgugcaacaagcuccgacacagaguccacgugacugcuaccaccaugaguacaugguucuccccucucgacccaggacuucuuuuugaauauccacggcucgauccagaggguggggcaugaccccuagcauagcgagcuacagcgggaacuguagcuaggccuuagcgugccuuggauacugccugauagggcgacggccuagucgugucgguucuauagguagcacauacaaauaugcagaacucucauuuuucuuucgauacagccucuggcaccuuugaagauguaaccggaacaaaagucaagaucguugaauaccccagaucggugaacaaugguguuuacgauucgucuacucauuuggagauacugaaccuacagggugaaauugaaauuuuaaggucuuucaaugaauaccaaauucgcgccgccaaacaacaacucggacuggacaucguguacgaacuacaggguaauguucagacaacgucaaagaaugauuuugauucccguggcaauaaugguaacaugaccuucaauuacuacgcaaacacuuaucagaauucaguagacuucucgaccuccucgucggcgucaggcgccggaccugggaacucucggggcggauuagcgggucuccucacaaauuucaguggaaucuugaacccucuuggcuaccucaaagaucacaacaccgaagaaauggaaaacucugcugaucgagucacaacgcaaacggcgggcaacacugccauaaacacgcaaucaucauuggguguguugugugccuacguugaagacccgaccaaaucugauccuccguccagcucuggcgauaucgagaccaaucccgggccgauguacaggaugcaacuccugucuugcauugcacuaagucuugcacuugucacgaauucacaggugcagcuccagcagaguggcgcagagcucgcucgcccaggcgcuucugugaaucugaguuguaaggccuccggauauacuuuuacgaacaacggcaucaacuggcugaagcagcggaccggccagggccuggaguggaucggcgaaauauacccccgguccacaaacacucucuauaacgagaaguuuaagggcaaagcaacucugaccgcggacagguccucuaacacagccuauauggagcugagaagcuugacgagugaggacuccgcugucuauuuuugcgcccgaacucugaccgcuccuuuugcuuuuuggggccagggcacgcucgugaccguaagugcgggcuccacuagcgguuccggcaaaccuggcagcggagaaggcagcaccaaagggcagaucguccugacgcagucuccagccaucaugagcgccucacccggcgaaaaggugaccaugaccugcucagccucuucuggugugaauuucaugcacugguaccagcaaaaaagugggaccuccccuaaaagguggaucuucgauaccagcaaacuggcuucuggcguucccgcaagguuuagcggcucugguuccggcacaucauacagccugacgaucagcagcauggaggcagaagacgcagcuaccuauuacugccagcaauggagcuuuaacccaccuacuuucggaggaggaacaaagcuggaaauaaaaagagguggugguggaucagaggugcagcugguggagucugggggaggcuuggugcagccuggaaagucccugaaacucuccugugaggccucuggauucaccuucagcggcuauggcaugcacuggguccgccaggcuccagggagggggcuggagucggucgcauacauuacuaguaguaguauuaauaucaaauaugcugacgcugugaaaggccgguucaccgucuccagagacaaugccaagaacuuacuguuucuacaaaugaacauucucaagucugaggacacagccauguacuacugugcaagauucgacugggacaaaaauuacuggggccaaggaaccauggucaccgucuccucagguggugguggaucagguggaggcggaaguggagguggcggauccgacauccagaugacccagucuccaucaucacugccugccucccugggagacagagucacuaucaauugucaggccagucaggacauuagcaauuauuuaaacugguaccagcagaaaccagggaaagcuccuaagcuccugaucuauuauacaaauaaauuggcagauggagucccaucaagguucaguggcagugguucugggagagauucuucuuucacuaucagcagccuggaauccgaagauauuggaucuuauuacugucaacaguauuauaacuauccguggacguucggaccuggcaccaagcuggaaaucaaacggcaccaccaucaucaccaccagugcaccaacuacgcccugcugaagcuggccggcgacguggagagcaaccccggccccaugaacccaagugcugccgucauuuucugccucauccugcugggucugagugggacucaagggaucccucucgcaaggacgguccgcugcaacugcauccauaucgaugacgggccagugagaaugagggccauagggaagcuugaaaucaucccugcgagccuauccugcccacguguugagaucauugccacgaugaaaaagaaugaugagcagagaugucugaauccggaaucuaagaccaucaagaauuuaaugaaagcguuuagccaaaaaaggucuaaaagggcuccugagggcagaggaagucugcuaacaugcggugacgucgaggagaaucccgggccugcuucugacaacccaauuuuggaguuucuugaagcagaaaaugaucuagucacucuggccucucucuggaagauggugcacucuguucaacagaccuggagaaaguaugugaagaacgaugauuuuuggcccaauuuacucagcgagcuagugggggaaggcucugucgccuuggccgccacgcuauccaaccaagcuucaguaaaggcucuuuugggccugcacuuucucucucgggggcucaauuacacugacuuuuacucuuuacugauagagaaaugcucuaguuucuuuaccguagaaccaccuccuccaccagcugaaaaccugaugaccaagcccucagugaagucgaaauuccgaaaacuguuuaagaugcaaggacccauggacaaagucaaagacuggaaccaaauagcugccggcuugaagaauuuucaauuuguucgugaccuagucaaagagguggucgauuggcugcaggccuggaucaacaaagagaaagccagcccuguccuccaguaccaguuggagaugaagaagcucgggccuguggccuuggcucaugacgcuuucauggcugguuccgggcccccucuuagcgacgaccagauugaauaccuccagaaccucaaaucucuugcccuaacacuggggaagacuaauuuggcccaaagucucaccacuaugaucaaugccaaacaaaguucagcccaacgaguugaacccguuguggugguccuuagaggcaagccgggaugcggcaagagcuuggccucuacguugauugcccaggcuguguccaagcgccucuauggcucccaaaguguauauucucuucccccagauccagauuucuucgauggauacaaaggacaguucgugaccuugauggaugauuugggacaaaacccggauggacaagauuucuccaccuuuugucagauggugucgaccgcccaauuucuccccaacauggcggaccuugcagagaaagggcgucccuuuaccuccaaucucaucauugcaacuacaaaucucccccacuucaguccugucaccauugcugauccuucugcagucucucgccguaucaacuacgaucugacucuagaaguaucugaggccuacaagaaacacacacggcugaauuuugacuuggcuuucaggcgcacagacgccccccccauuuauccuuuugcugcccaugugcccuuuguggacguagcugugcgcuucaaaaauggucaccagaauuuuaaucuccuagaguuggucgauuccauuuguacagacauucgagccaagcaacaaggugcccgaaacaugcagacucugguucuacagagccccaacgagaaugaugacacccccgucgacgaggcguuggguagaguucucucccccgcugcggucgaugaggcgcuugucgaccucacuccagaggccgacccgguuggccguuuggcuauucuugccaagcuaggucuugcccuagcugcggucaccccuggucugauaaucuuggcagugggacucuacagguacuucucuggcucugaugcagaccaagaagaaacagaaagugagggaucugucaaggcacccaggagcgaaaaugcuuaugacggcccgaagaaaaacucuaagcccccuggagcacucucucucauggaaaugcaacagcccaacguggacaugggcuuugaggcugcggucgcuaagaaaguggucguccccauuaccuucaugguucccaacagaccuucugggcuuacacaguccgcucuucuggugaccggccggaccuuccuaaucaaugaacauacaugguccaaucccuccuggaccagcuucacaauccgcggugagguacacacucgugaugagcccuuccaaacgguucauuucacucaccacgguauucccacagaucugaugaugguacgucucggaccgggcaauucuuucccuaacaaucuagacaaguuuggacuugaccagaugccggcacgcaacucccgugugguuggcguuucguccaguuacggaaacuucuucuucucuggaaauuuccucggauuuguugauuccaucaccucugaacaaggaacuuacgcaagacucuuuagguacagggugacgaccuacaaaggauggugcggcucggcccuggucugugaggccgguggcguccgacgcaucauuggccugcauucugcuggcgccgccgguaucggcgccgggaccuauaucucaaaauuaggacuaaucaaagcccugaaacaccucggugaaccuuuggccacaaugcaaggacugaugacugaauuagagccuggaaucaccguacauguaccccggaaauccaaauugagaaagacgaccgcacacgcgguguacaaaccggaguuugagccugcuguguugucaaaauuugaucccagacugaacaaggauguugacuuggaugaaguaauuuggucuaaacacacugccaaugucccuuaccaaccuccuuuguucuacacauacaugucagaguacgcucaucgagucuucuccuucuuggggaaagacaaugacauucugaccgucaaagaagcaauucugggcauccccggacuagaccccauggauccccacacagcuccgggucugccuuacgccaucaacggccuucgacguacugaucucgucgauuuugugaacgguacaguagaugcggcgcuggcuguacaaauccagaaauucuuagacggugacuacucugaccaugucuuccaaacuuuucugaaagaugagaucagacccucagagaaaguccgagcgggaaaaacccgcauuguugaugugcccucccuggcgcauugcauugugggcagaauguugcuugggcgcuuugcugccaaguuucaaucccauccuggcuuucuccucggcucugcuaucgggucugacccugauguuuucuggaccgucauaggggcucaacucgaggggagaaagaacacguaugacguggacuacagugccuuugacucuucacacggcacuggcuccuucgaggcucucaucucucacuuuuucaccguggacaaugguuuuagcccugcgcugggaccguaucucagaucccuggcugucucggugcacgcuuacggcgagcgucgcaucaagauuaccgguggccuccccuccgguugugccgcgaccagccugcugaacacagugcucaacaaugugaucaucaggacugcucuggcauugacuuacaaggaauuugaauaugacaugguugauaucaucgccuacggugacgaccuucugguuggcacggauuacgaucuggacuucaaugagguggcacgacgcgcugccaaguugggguauaagaugacuccugccaacaaggguucugucuucccuccgacuuccucucuuuccgaugcuguuuuucuaaagcgcaaauucguccaaaacaacgacggcuuauacaaaccaguuauggauuuaaagaauuuggaagccaugcucuccuacuucaaaccaggaacacuacucgagaagcugcaaucuguuucuauguuggcucaacauucuggaaaagaagaauaugauagauugaugcaccccuucgcugacuacggugccguaccgagucacgaguaccugcaggcaagauggagggccuuguucgacugacccagauagcccaaggcgcuucggugcugccggcgauucugggagaacucagucggaacagaaaagggaaaaaaaaaaaaaaaaaaaaaaaaaaaaaa

SEQ ID NO: 49 - DNA, 9598 bp, Artificial Sequence
  SVV-Trunc10m FAP CD3 BiTE 6His F2A-CXCL10
cgcccccctgacgagcatcacaaaaatcgacgctcaagtcagaggtggcgaaacccgacaggactataaagataccaggcgtttccccctggaagctccctcgtgcgctctcctgttccgaccctgccgcttaccggatacctgtccgcctttctcccttcgggaagcgtggcgctttctcatagctcacgctgtaggtatctcagttcggtgtaggtcgttcgctccaagctgggctgtgtgcacgaaccccccgttcagcccgaccgctgcgccttatccggtaactatcgtcttgagtccaacccggtaagacacgacttatcgccactggcagcagccactggtaacaggattagcagagcgaggtatgtaggcggtgctacagagttcttgaagtggtggcctaactacggctacactagaagaacagtatttggtatctgcgctctgctgaagccagttaccttcggaaaaagagttggtagctcttgatccggcaaacaaaccaccgctggtagcggtggtttttttgtttgcaagcagcagattacgcgcagaaaaaaaggatctcaagaagatccttttaaaaaaattcatccaacaaacgataaaatgcaatacgttgactatctggtgctgcaataccatataaaactaaaaaacgatctgcccattcaccacctaattcttctgcaatatcacgagttgctaatgcaatatcttgataacgatctgcaacacctaaacgaccacaatcaatgaaaccactaaaacgaccattttcaaccataatatttggtaaacatgcatcaccatgagtaacaactaaatcttcaccatctggcatacttgcttttaaacgtgcaaacaattctgctggtgctaaaccttgatgttcttcatctaaatcatcttgatcaactaaacctgcttccatacgagtacgtgcacgttcaatacgatgttttgcttgatgatcaaatggacaagttgctggatctaaagtatgtaaacgacgcattgcatctgccataatactaactttttctgctggtgctaaatgactagataacaaatcttgacctggaacttcacctaacaacaaccaatcacgacctgcttcagtaacaacatctaaaactgctgcacatggaacaccagtagttgctaaccaacttaaacgtgctgcttcatcttgtaattcatttaatgcaccacttaaatcagttttaacaaacaaaactggacgaccttgtgcacttaaacgaaaaactgctgcatcagaacaaccaatagtttgttgtgcccaatcataaccaaacaaacgttcaacccatgctgctggactacctgcatgtaaaccatcttgttcaatcatactcttcctttttcaatattattgaagcatttatcagggttattgtctcatgagcggatacatatttgaagaattcacattgattattgactagttattaatagtaatcaattacggggtcattagttcatagcccatatatggagttccgcgttacataacttacggtaaatggcccgcctggctgaccgcccaacgacccccgcccattgacgtcaataatgacgtatgttcccatagtaacgccaatagggactttccattgacgtcaatgggtggagtatttacggtaaactgcccacttggcagtacatcaagtgtatcatatgccaagtacgccccctattgacgtcaatgacggtaaatggcccgcctggcattatgcccagtacatgaccttatgggactttcctacttggcagtacatctacgtattagtcatcgctattaccatggtgatgcggttttggcagtacatcaatgggcgtggatagcggtttgactcacggggatttccaagtctccaccccattgacgtcaatgggagtttgttttggcaccaaaatcaacgggactttccaaaatgtcgtaacaactccgccccattgacgcaaatgggcggtaggcgtgtacggtgggaggtctatataagcagagctctctggctaactagagaacccactgcttactggcttatcgaaattaatacgactcactatagggagacccaagctggctagcgtttaaacttaagcttggtaccttatcaaactgatgagtccgtgaggacgaaacgagtaagctcgtctttgaaatggggggctgggccctgatgcccagtccttcctttccccttccggggggttaaccggctgtgtttgctagaggcacagaggggcaacatccaacctgcttttgcggggaacggtgcggctccgattcctgcgtcgccaaaggtgttagcgcacccaaacggcgcacctaccaatgttattggtgtggtctgcgagttctagcctactcgtttctcccccgaccattcactcacccacgaaaagtgtgttgtaaccataagatttaacccccgcacgggatgtgcgataaccgtaagactggctcaagcgcggaaagcgctgtaaccacatgctgttagtccctttatggctgcaagatggctacccacctcggatcactgaactggagctcgaccctccttagtaagggaaccgagaggccttcgtgcaacaagctccgacacagagtccacgtgactgctaccaccatgagtacatggttctcccctctcgacccaggacttctttttgaatatccacggctcgatccagagggtggggcatgacccctagcatagcgagctacagcgggaactgtagctaggccttagcgtgccttggatactgcctgatagggcgacggcctagtcgtgtcggttctataggtagcacatacaaatatgcagaactctcatttttctttcgatacagcctctggcacctttgaagatgtaaccggaacaaaagtcaagatcgttgaataccccagatcggtgaacaatggtgtttacgattcgtctactcatttggagatactgaacctacagggtgaaattgaaattttaaggtctttcaatgaataccaaattcgcgccgccaaacaacaactcggactggacatcgtgtacgaactacagggtaatgttcagacaacgtcaaagaatgattttgattcccgtggcaataatggtaacatgaccttcaattactacgcaaacacttatcagaattcagtagacttctcgacctcctcgtcggcgtcaggcgccggacctgggaactctcggggcggattagcgggtctcctcacaaatttcagtggaatcttgaaccctcttggctacctcaaagatcacaacaccgaagaaatggaaaactctgctgatcgagtcacaacgcaaacggcgggcaacactgccataaacacgcaatcatcattgggtgtgttgtgtgcctacgttgaagacccgaccaaatctgatcctccgtccagctctggcgatatcgagaccaatcccgggccgatgtacaggatgcaactcctgtcttgcattgcactaagtcttgcacttgtcacgaattcacaggtgcagctccagcagagtggcgcagagctcgctcgcccaggcgcttctgtgaatctgagttgtaaggcctccggatatacttttacgaacaacggcatcaactggctgaagcagcggaccggccagggcctggagtggatcggcgaaatatacccccggtccacaaacactctctataacgagaagtttaagggcaaagcaactctgaccgcggacaggtcctctaacacagcctatatggagctgagaagcttgacgagtgaggactccgctgtctatttttgcgcccgaactctgaccgctccttttgctttttggggccagggcacgctcgtgaccgtaagtgcgggctccactagcggttccggcaaacctggcagcggagaaggcagcaccaaagggcagatcgtcctgacgcagtctccagccatcatgagcgcctcacccggcgaaaaggtgaccatgacctgctcagcctcttctggtgtgaatttcatgcactggtaccagcaaaaaagtgggacctcccctaaaaggtggatcttcgataccagcaaactggcttctggcgttcccgcaaggtttagcggctctggttccggcacatcatacagcctgacgatcagcagcatggaggcagaagacgcagctacctattactgccagcaatggagctttaacccacctactttcggaggaggaacaaagctggaaataaaaagaggtggtggtggatcagaggtgcagctggtggagtctgggggaggcttggtgcagcctggaaagtccctgaaactctcctgtgaggcctctggattcaccttcagcggctatggcatgcactgggtccgccaggctccagggagggggctggagtcggtcgcatacattactagtagtagtattaatatcaaatatgctgacgctgtgaaaggccggttcaccgtctccagagacaatgccaagaacttactgtttctacaaatgaacattctcaagtctgaggacacagccatgtactactgtgcaagattcgactgggacaaaaattactggggccaaggaaccatggtcaccgtctcctcaggtggtggtggatcaggtggaggcggaagtggaggtggcggatccgacatccagatgacccagtctccatcatcactgcctgcctccctgggagacagagtcactatcaattgtcaggccagtcaggacattagcaattatttaaactggtaccagcagaaaccagggaaagctcctaagctcctgatctattatacaaataaattggcagatggagtcccatcaaggttcagtggcagtggttctgggagagattcttctttcactatcagcagcctggaatccgaagatattggatcttattactgtcaacagtattataactatccgtggacgttcggacctggcaccaagctggaaatcaaacggcaccaccatcatcaccacgtgaagcagaccctgaacttcgacctgctgaagctggccggcgacgtggagagcaaccccggccccatgaacccaagtgctgccgtcattttctgcctcatcctgctgggtctgagtgggactcaagggatccctctcgcaaggacggtccgctgcaactgcatccatatcgatgacgggccagtgagaatgagggccatagggaagcttgaaatcatccctgcgagcctatcctgcccacgtgttgagatcattgccacgatgaaaaagaatgatgagcagagatgtctgaatccggaatctaagaccatcaagaatttaatgaaagcgtttagccaaaaaaggtctaaaagggctcctgagggcagaggaagtctgctaacatgcggtgacgtcgaggagaatcccgggcctgcttctgacaacccaattttggagtttcttgaagcagaaaatgatctagtcactctggcctctctctggaagatggtgcactctgttcaacagacctggagaaagtatgtgaagaacgatgatttttggcccaatttactcagcgagctagtgggggaaggctctgtcgccttggccgccacgctatccaaccaagcttcagtaaaggctcttttgggcctgcactttctctctcgggggctcaattacactgacttttactctttactgatagagaaatgctctagtttctttaccgtagaaccacctcctccaccagctgaaaacctgatgaccaagccctcagtgaagtcgaaattccgaaaactgtttaagatgcaaggacccatggacaaagtcaaagactggaaccaaatagctgccggcttgaagaattttcaatttgttcgtgacctagtcaaagaggtggtcgattggctgcaggcctggatcaacaaagagaaagccagccctgtcctccagtaccagttggagatgaagaagctcgggcctgtggccttggctcatgacgctttcatggctggttccgggccccctcttagcgacgaccagattgaatacctccagaacctcaaatctcttgccctaacactggggaagactaatttggcccaaagtctcaccactatgatcaatgccaaacaaagttcagcccaacgagttgaacccgttgtggtggtccttagaggcaagccgggatgcggcaagagcttggcctctacgttgattgcccaggctgtgtccaagcgcctctatggctcccaaagtgtatattctcttcccccagatccagatttcttcgatggatacaaaggacagttcgtgaccttgatggatgatttgggacaaaacccggatggacaagatttctccaccttttgtcagatggtgtcgaccgcccaatttctccccaacatggcggaccttgcagagaaagggcgtccctttacctccaatctcatcattgcaactacaaatctcccccacttcagtcctgtcaccattgctgatccttctgcagtctctcgccgtatcaactacgatctgactctagaagtatctgaggcctacaagaaacacacacggctgaattttgacttggctttcaggcgcacagacgccccccccatttatccttttgctgcccatgtgccctttgtggacgtagctgtgcgcttcaaaaatggtcaccagaattttaatctcctagagttggtcgattccatttgtacagacattcgagccaagcaacaaggtgcccgaaacatgcagactctggttctacagagccccaacgagaatgatgacacccccgtcgacgaggcgttgggtagagttctctcccccgctgcggtcgatgaggcgcttgtcgacctcactccagaggccgacccggttggccgtttggctattcttgccaagctaggtcttgccctagctgcggtcacccctggtctgataatcttggcagtgggactctacaggtacttctctggctctgatgcagaccaagaagaaacagaaagtgagggatctgtcaaggcacccaggagcgaaaatgcttatgacggcccgaagaaaaactctaagccccctggagcactctctctcatggaaatgcaacagcccaacgtggacatgggctttgaggctgcggtcgctaagaaagtggtcgtccccattaccttcatggttcccaacagaccttctgggcttacacagtccgctcttctggtgaccggccggaccttcctaatcaatgaacatacatggtccaatccctcctggaccagcttcacaatccgcggtgaggtacacactcgtgatgagcccttccaaacggttcatttcactcaccacggtattcccacagatctgatgatggtacgtctcggaccgggcaattctttccctaacaatctagacaagtttggacttgaccagatgccggcacgcaactcccgtgtggttggcgtttcgtccagttacggaaacttcttcttctctggaaatttcctcggatttgttgattccatcacctctgaacaaggaacttacgcaagactctttaggtacagggtgacgacctacaaaggatggtgcggctcggccctggtctgtgaggccggtggcgtccgacgcatcattggcctgcattctgctggcgccgccggtatcggcgccgggacctatatctcaaaattaggactaatcaaagccctgaaacacctcggtgaacctttggccacaatgcaaggactgatgactgaattagagcctggaatcaccgtacatgtaccccggaaatccaaattgagaaagacgaccgcacacgcggtgtacaaaccggagtttgagcctgctgtgttgtcaaaatttgatcccagactgaacaaggatgttgacttggatgaagtaatttggtctaaacacactgccaatgtcccttaccaacctcctttgttctacacatacatgtcagagtacgctcatcgagtcttctccttcttggggaaagacaatgacattctgaccgtcaaagaagcaattctgggcatccccggactagaccccatggatccccacacagctccgggtctgccttacgccatcaacggccttcgacgtactgatctcgtcgattttgtgaacggtacagtagatgcggcgctggctgtacaaatccagaaattcttagacggtgactactctgaccatgtcttccaaacttttctgaaagatgagatcagaccctcagagaaagtccgagcgggaaaaacccgcattgttgatgtgccctccctggcgcattgcattgtgggcagaatgttgcttgggcgctttgctgccaagtttcaatcccatcctggctttctcctcggctctgctatcgggtctgaccctgatgttttctggaccgtcataggggctcaactcgaggggagaaagaacacgtatgacgtggactacagtgcctttgactcttcacacggcactggctccttcgaggctctcatctctcactttttcaccgtggacaatggttttagccctgcgctgggaccgtatctcagatccctggctgtctcggtgcacgcttacggcgagcgtcgcatcaagattaccggtggcctcccctccggttgtgccgcgaccagcctgctgaacacagtgctcaacaatgtgatcatcaggactgctctggcattgacttacaaggaatttgaatatgacatggttgatatcatcgcctacggtgacgaccttctggttggcacggattacgatctggacttcaatgaggtggcacgacgcgctgccaagttggggtataagatgactcctgccaacaagggttctgtcttccctccgacttcctctctttccgatgctgtttttctaaagcgcaaattcgtccaaaacaacgacggcttatacaaaccagttatggatttaaagaatttggaagccatgctctcctacttcaaaccaggaacactactcgagaagctgcaatctgtttctatgttggctcaacattctggaaaagaagaatatgatagattgatgcaccccttcgctgactacggtgccgtaccgagtcacgagtacctgcaggcaagatggagggccttgttcgactgacccagatagcccaaggcgcttcggtgctgccggcgattctgggagaactcagtcggaacagaaaagggaaaaaaaaaaaaaaaaaaaaaaaaaaaaaaggccggcatggtcccagcctcctcgctggcgccggctgggcaacatgcttcggcatggcgaatgggacgcggccgctcgagtctagagggcccgtttaaacccgctgatcagcctcgactgtgccttctagttgccagccatctgttgtttgcccctcccccgtgccttccttgaccctggaaggtgccactcccactgtcctttcctaataaaatgaggaaattgcatcgcattgtctgagtaggtgtcattctattctggggggtggggtggggcaggacagcaagggggaggattgggaagacaatagcaggcatgctggggatgcggtgggctctatggtgctggcgtttttccataggctc

SEQ ID NO: 50 - RNA, 7043 nt, Artificial Sequence
  SVV-Trunc10m FAP CD3 BiTE 6His F2A-CXCL10 RNA
uuugaaauggggggcugggcccugaugcccaguccuuccuuuccccuuccgggggguuaaccggcuguguuugcuagaggcacagaggggcaacauccaaccugcuuuugcggggaacggugcggcuccgauuccugcgucgccaaagguguuagcgcacccaaacggcgcaccuaccaauguuauugguguggucugcgaguucuagccuacucguuucucccccgaccauucacucacccacgaaaaguguguuguaaccauaagauuuaacccccgcacgggaugugcgauaaccguaagacuggcucaagcgcggaaagcgcuguaaccacaugcuguuagucccuuuauggcugcaagauggcuacccaccucggaucacugaacuggagcucgacccuccuuaguaagggaaccgagaggccuucgugcaacaagcuccgacacagaguccacgugacugcuaccaccaugaguacaugguucuccccucucgacccaggacuucuuuuugaauauccacggcucgauccagaggguggggcaugaccccuagcauagcgagcuacagcgggaacuguagcuaggccuuagcgugccuuggauacugccugauagggcgacggccuagucgugucgguucuauagguagcacauacaaauaugcagaacucucauuuuucuuucgauacagccucuggcaccuuugaagauguaaccggaacaaaagucaagaucguugaauaccccagaucggugaacaaugguguuuacgauucgucuacucauuuggagauacugaaccuacagggugaaauugaaauuuuaaggucuuucaaugaauaccaaauucgcgccgccaaacaacaacucggacuggacaucguguacgaacuacaggguaauguucagacaacgucaaagaaugauuuugauucccguggcaauaaugguaacaugaccuucaauuacuacgcaaacacuuaucagaauucaguagacuucucgaccuccucgucggcgucaggcgccggaccugggaacucucggggcggauuagcgggucuccucacaaauuucaguggaaucuugaacccucuuggcuaccucaaagaucacaacaccgaagaaauggaaaacucugcugaucgagucacaacgcaaacggcgggcaacacugccauaaacacgcaaucaucauuggguguguugugugccuacguugaagacccgaccaaaucugauccuccguccagcucuggcgauaucgagaccaaucccgggccgauguacaggaugcaacuccugucuugcauugcacuaagucuugcacuugucacgaauucacaggugcagcuccagcagaguggcgcagagcucgcucgcccaggcgcuucugugaaucugaguuguaaggccuccggauauacuuuuacgaacaacggcaucaacuggcugaagcagcggaccggccagggccuggaguggaucggcgaaauauacccccgguccacaaacacucucuauaacgagaaguuuaagggcaaagcaacucugaccgcggacagguccucuaacacagccuauauggagcugagaagcuugacgagugaggacuccgcugucuauuuuugcgcccgaacucugaccgcuccuuuugcuuuuuggggccagggcacgcucgugaccguaagugcgggcuccacuagcgguuccggcaaaccuggcagcggagaaggcagcaccaaagggcagaucguccugacgcagucuccagccaucaugagcgccucacccggcgaaaaggugaccaugaccugcucagccucuucuggugugaauuucaugcacugguaccagcaaaaaagugggaccuccccuaaaagguggaucuucgauaccagcaaacuggcuucuggcguucccgcaagguuuagcggcucugguuccggcacaucauacagccugacgaucagcagcauggaggcagaagacgcagcuaccuauuacugccagcaauggagcuuuaacccaccuacuuucggaggaggaacaaagcuggaaauaaaaagagguggugguggaucagaggugcagcugguggagucugggggaggcuuggugcagccuggaaagucccugaaacucuccugugaggccucuggauucaccuucagcggcuauggcaugcacuggguccgccaggcuccagggagggggcuggagucggucgcauacauuacuaguaguaguauuaauaucaaauaugcugacgcugugaaaggccgguucaccgucuccagagacaaugccaagaacuuacuguuucuacaaaugaacauucucaagucugaggacacagccauguacuacugugcaagauucgacugggacaaaaauuacuggggccaaggaaccauggucaccgucuccucagguggugguggaucagguggaggcggaaguggagguggcggauccgacauccagaugacccagucuccaucaucacugccugccucccugggagacagagucacuaucaauugucaggccagucaggacauuagcaauuauuuaaacugguaccagcagaaaccagggaaagcuccuaagcuccugaucuauuauacaaauaaauuggcagauggagucccaucaagguucaguggcagugguucugggagagauucuucuuucacuaucagcagccuggaauccgaagauauuggaucuuauuacugucaacaguauuauaacuauccguggacguucggaccuggcaccaagcuggaaaucaaacggcaccaccaucaucaccacgugaagcagacccugaacuucgaccugcugaagcuggccggcgacguggagagcaaccccggccccaugaacccaagugcugccgucauuuucugccucauccugcugggucugagugggacucaagggaucccucucgcaaggacgguccgcugcaacugcauccauaucgaugacgggccagugagaaugagggccauagggaagcuugaaaucaucccugcgagccuauccugcccacguguugagaucauugccacgaugaaaaagaaugaugagcagagaugucugaauccggaaucuaagaccaucaagaauuuaaugaaagcguuuagccaaaaaaggucuaaaagggcuccugagggcagaggaagucugcuaacaugcggugacgucgaggagaaucccgggccugcuucugacaacccaauuuuggaguuucuugaagcagaaaaugaucuagucacucuggccucucucuggaagauggugcacucuguucaacagaccuggagaaaguaugugaagaacgaugauuuuuggcccaauuuacucagcgagcuagugggggaaggcucugucgccuuggccgccacgcuauccaaccaagcuucaguaaaggcucuuuugggccugcacuuucucucucgggggcucaauuacacugacuuuuacucuuuacugauagagaaaugcucuaguuucuuuaccguagaaccaccuccuccaccagcugaaaaccugaugaccaagcccucagugaagucgaaauuccgaaaacuguuuaagaugcaaggacccauggacaaagucaaagacuggaaccaaauagcugccggcuugaagaauuuucaauuuguucgugaccuagucaaagagguggucgauuggcugcaggccuggaucaacaaagagaaagccagcccuguccuccaguaccaguuggagaugaagaagcucgggccuguggccuuggcucaugacgcuuucauggcugguuccgggcccccucuuagcgacgaccagauugaauaccuccagaaccucaaaucucuugcccuaacacuggggaagacuaauuuggcccaaagucucaccacuaugaucaaugccaaacaaaguucagcccaacgaguugaacccguuguggugguccuuagaggcaagccgggaugcggcaagagcuuggccucuacguugauugcccaggcuguguccaagcgccucuauggcucccaaaguguauauucucuucccccagauccagauuucuucgauggauacaaaggacaguucgugaccuugauggaugauuugggacaaaacccggauggacaagauuucuccaccuuuugucagauggugucgaccgcccaauuucuccccaacauggcggaccuugcagagaaagggcgucccuuuaccuccaaucucaucauugcaacuacaaaucucccccacuucaguccugucaccauugcugauccuucugcagucucucgccguaucaacuacgaucugacucuagaaguaucugaggccuacaagaaacacacacggcugaauuuugacuuggcuuucaggcgcacagacgccccccccauuuauccuuuugcugcccaugugcccuuuguggacguagcugugcgcuucaaaaauggucaccagaauuuuaaucuccuagaguuggucgauuccauuuguacagacauucgagccaagcaacaaggugcccgaaacaugcagacucugguucuacagagccccaacgagaaugaugacacccccgucgacgaggcguuggguagaguucucucccccgcugcggucgaugaggcgcuugucgaccucacuccagaggccgacccgguuggccguuuggcuauucuugccaagcuaggucuugcccuagcugcggucaccccuggucugauaaucuuggcagugggacucuacagguacuucucuggcucugaugcagaccaagaagaaacagaaagugagggaucugucaaggcacccaggagcgaaaaugcuuaugacggcccgaagaaaaacucuaagcccccuggagcacucucucucauggaaaugcaacagcccaacguggacaugggcuuugaggcugcggucgcuaagaaaguggucguccccauuaccuucaugguucccaacagaccuucugggcuuacacaguccgcucuucuggugaccggccggaccuuccuaaucaaugaacauacaugguccaaucccuccuggaccagcuucacaauccgcggugagguacacacucgugaugagcccuuccaaacgguucauuucacucaccacgguauucccacagaucugaugaugguacgucucggaccgggcaauucuuucccuaacaaucuagacaaguuuggacuugaccagaugccggcacgcaacucccgugugguuggcguuucguccaguuacggaaacuucuucuucucuggaaauuuccucggauuuguugauuccaucaccucugaacaaggaacuuacgcaagacucuuuagguacagggugacgaccuacaaaggauggugcggcucggcccuggucugugaggccgguggcguccgacgcaucauuggccugcauucugcuggcgccgccgguaucggcgccgggaccuauaucucaaaauuaggacuaaucaaagcccugaaacaccucggugaaccuuuggccacaaugcaaggacugaugacugaauuagagccuggaaucaccguacauguaccccggaaauccaaauugagaaagacgaccgcacacgcgguguacaaaccggaguuugagccugcuguguugucaaaauuugaucccagacugaacaaggauguugacuuggaugaaguaauuuggucuaaacacacugccaaugucccuuaccaaccuccuuuguucuacacauacaugucagaguacgcucaucgagucuucuccuucuuggggaaagacaaugacauucugaccgucaaagaagcaauucugggcauccccggacuagaccccauggauccccacacagcuccgggucugccuuacgccaucaacggccuucgacguacugaucucgucgauuuugugaacgguacaguagaugcggcgcuggcuguacaaauccagaaauucuuagacggugacuacucugaccaugucuuccaaacuuuucugaaagaugagaucagacccucagagaaaguccgagcgggaaaaacccgcauuguugaugugcccucccuggcgcauugcauugugggcagaauguugcuugggcgcuuugcugccaaguuucaaucccauccuggcuuucuccucggcucugcuaucgggucugacccugauguuuucuggaccgucauaggggcucaacucgaggggagaaagaacacguaugacguggacuacagugccuuugacucuucacacggcacuggcuccuucgaggcucucaucucucacuuuuucaccguggacaaugguuuuagcccugcgcugggaccguaucucagaucccuggcugucucggugcacgcuuacggcgagcgucgcaucaagauuaccgguggccuccccuccgguugugccgcgaccagccugcugaacacagugcucaacaaugugaucaucaggacugcucuggcauugacuuacaaggaauuugaauaugacaugguugauaucaucgccuacggugacgaccuucugguuggcacggauuacgaucuggacuucaaugagguggcacgacgcgcugccaaguugggguauaagaugacuccugccaacaaggguucugucuucccuccgacuuccucucuuuccgaugcuguuuuucuaaagcgcaaauucguccaaaacaacgacggcuuauacaaaccaguuauggauuuaaagaauuuggaagccaugcucuccuacuucaaaccaggaacacuacucgagaagcugcaaucuguuucuauguuggcucaacauucuggaaaagaagaauaugauagauugaugcaccccuucgcugacuacggugccguaccgagucacgaguaccugcaggcaagauggagggccuuguucgacugacccagauagcccaaggcgcuucggugcugccggcgauucugggagaacucagucggaacagaaaagggaaaaaaaaaaaaaaaaaaaaaaaaaaaaaa

SEQ ID NO: 51 - DNA, 9589 bp, Artificial Sequence
  SVV-Trunc10m FAP CD3 BiTE 6His P2A-CXCL10
cgcccccctgacgagcatcacaaaaatcgacgctcaagtcagaggtggcgaaacccgacaggactataaagataccaggcgtttccccctggaagctccctcgtgcgctctcctgttccgaccctgccgcttaccggatacctgtccgcctttctcccttcgggaagcgtggcgctttctcatagctcacgctgtaggtatctcagttcggtgtaggtcgttcgctccaagctgggctgtgtgcacgaaccccccgttcagcccgaccgctgcgccttatccggtaactatcgtcttgagtccaacccggtaagacacgacttatcgccactggcagcagccactggtaacaggattagcagagcgaggtatgtaggcggtgctacagagttcttgaagtggtggcctaactacggctacactagaagaacagtatttggtatctgcgctctgctgaagccagttaccttcggaaaaagagttggtagctcttgatccggcaaacaaaccaccgctggtagcggtggtttttttgtttgcaagcagcagattacgcgcagaaaaaaaggatctcaagaagatccttttaaaaaaattcatccaacaaacgataaaatgcaatacgttgactatctggtgctgcaataccatataaaactaaaaaacgatctgcccattcaccacctaattcttctgcaatatcacgagttgctaatgcaatatcttgataacgatctgcaacacctaaacgaccacaatcaatgaaaccactaaaacgaccattttcaaccataatatttggtaaacatgcatcaccatgagtaacaactaaatcttcaccatctggcatacttgcttttaaacgtgcaaacaattctgctggtgctaaaccttgatgttcttcatctaaatcatcttgatcaactaaacctgcttccatacgagtacgtgcacgttcaatacgatgttttgcttgatgatcaaatggacaagttgctggatctaaagtatgtaaacgacgcattgcatctgccataatactaactttttctgctggtgctaaatgactagataacaaatcttgacctggaacttcacctaacaacaaccaatcacgacctgcttcagtaacaacatctaaaactgctgcacatggaacaccagtagttgctaaccaacttaaacgtgctgcttcatcttgtaattcatttaatgcaccacttaaatcagttttaacaaacaaaactggacgaccttgtgcacttaaacgaaaaactgctgcatcagaacaaccaatagtttgttgtgcccaatcataaccaaacaaacgttcaacccatgctgctggactacctgcatgtaaaccatcttgttcaatcatactcttcctttttcaatattattgaagcatttatcagggttattgtctcatgagcggatacatatttgaagaattcacattgattattgactagttattaatagtaatcaattacggggtcattagttcatagcccatatatggagttccgcgttacataacttacggtaaatggcccgcctggctgaccgcccaacgacccccgcccattgacgtcaataatgacgtatgttcccatagtaacgccaatagggactttccattgacgtcaatgggtggagtatttacggtaaactgcccacttggcagtacatcaagtgtatcatatgccaagtacgccccctattgacgtcaatgacggtaaatggcccgcctggcattatgcccagtacatgaccttatgggactttcctacttggcagtacatctacgtattagtcatcgctattaccatggtgatgcggttttggcagtacatcaatgggcgtggatagcggtttgactcacggggatttccaagtctccaccccattgacgtcaatgggagtttgttttggcaccaaaatcaacgggactttccaaaatgtcgtaacaactccgccccattgacgcaaatgggcggtaggcgtgtacggtgggaggtctatataagcagagctctctggctaactagagaacccactgcttactggcttatcgaaattaatacgactcactatagggagacccaagctggctagcgtttaaacttaagcttggtaccttatcaaactgatgagtccgtgaggacgaaacgagtaagctcgtctttgaaatggggggctgggccctgatgcccagtccttcctttccccttccggggggttaaccggctgtgtttgctagaggcacagaggggcaacatccaacctgcttttgcggggaacggtgcggctccgattcctgcgtcgccaaaggtgttagcgcacccaaacggcgcacctaccaatgttattggtgtggtctgcgagttctagcctactcgtttctcccccgaccattcactcacccacgaaaagtgtgttgtaaccataagatttaacccccgcacgggatgtgcgataaccgtaagactggctcaagcgcggaaagcgctgtaaccacatgctgttagtccctttatggctgcaagatggctacccacctcggatcactgaactggagctcgaccctccttagtaagggaaccgagaggccttcgtgcaacaagctccgacacagagtccacgtgactgctaccaccatgagtacatggttctcccctctcgacccaggacttctttttgaatatccacggctcgatccagagggtggggcatgacccctagcatagcgagctacagcgggaactgtagctaggccttagcgtgccttggatactgcctgatagggcgacggcctagtcgtgtcggttctataggtagcacatacaaatatgcagaactctcatttttctttcgatacagcctctggcacctttgaagatgtaaccggaacaaaagtcaagatcgttgaataccccagatcggtgaacaatggtgtttacgattcgtctactcatttggagatactgaacctacagggtgaaattgaaattttaaggtctttcaatgaataccaaattcgcgccgccaaacaacaactcggactggacatcgtgtacgaactacagggtaatgttcagacaacgtcaaagaatgattttgattcccgtggcaataatggtaacatgaccttcaattactacgcaaacacttatcagaattcagtagacttctcgacctcctcgtcggcgtcaggcgccggacctgggaactctcggggcggattagcgggtctcctcacaaatttcagtggaatcttgaaccctcttggctacctcaaagatcacaacaccgaagaaatggaaaactctgctgatcgagtcacaacgcaaacggcgggcaacactgccataaacacgcaatcatcattgggtgtgttgtgtgcctacgttgaagacccgaccaaatctgatcctccgtccagctctggcgatatcgagaccaatcccgggccgatgtacaggatgcaactcctgtcttgcattgcactaagtcttgcacttgtcacgaattcacaggtgcagctccagcagagtggcgcagagctcgctcgcccaggcgcttctgtgaatctgagttgtaaggcctccggatatacttttacgaacaacggcatcaactggctgaagcagcggaccggccagggcctggagtggatcggcgaaatatacccccggtccacaaacactctctataacgagaagtttaagggcaaagcaactctgaccgcggacaggtcctctaacacagcctatatggagctgagaagcttgacgagtgaggactccgctgtctatttttgcgcccgaactctgaccgctccttttgctttttggggccagggcacgctcgtgaccgtaagtgcgggctccactagcggttccggcaaacctggcagcggagaaggcagcaccaaagggcagatcgtcctgacgcagtctccagccatcatgagcgcctcacccggcgaaaaggtgaccatgacctgctcagcctcttctggtgtgaatttcatgcactggtaccagcaaaaaagtgggacctcccctaaaaggtggatcttcgataccagcaaactggcttctggcgttcccgcaaggtttagcggctctggttccggcacatcatacagcctgacgatcagcagcatggaggcagaagacgcagctacctattactgccagcaatggagctttaacccacctactttcggaggaggaacaaagctggaaataaaaagaggtggtggtggatcagaggtgcagctggtggagtctgggggaggcttggtgcagcctggaaagtccctgaaactctcctgtgaggcctctggattcaccttcagcggctatggcatgcactgggtccgccaggctccagggagggggctggagtcggtcgcatacattactagtagtagtattaatatcaaatatgctgacgctgtgaaaggccggttcaccgtctccagagacaatgccaagaacttactgtttctacaaatgaacattctcaagtctgaggacacagccatgtactactgtgcaagattcgactgggacaaaaattactggggccaaggaaccatggtcaccgtctcctcaggtggtggtggatcaggtggaggcggaagtggaggtggcggatccgacatccagatgacccagtctccatcatcactgcctgcctccctgggagacagagtcactatcaattgtcaggccagtcaggacattagcaattatttaaactggtaccagcagaaaccagggaaagctcctaagctcctgatctattatacaaataaattggcagatggagtcccatcaaggttcagtggcagtggttctgggagagattcttctttcactatcagcagcctggaatccgaagatattggatcttattactgtcaacagtattataactatccgtggacgttcggacctggcaccaagctggaaatcaaacggcaccaccatcatcaccacgccaccaacttcagcctgctgaagcaggccggcgacgtggaggagaaccccggccccatgaacccaagtgctgccgtcattttctgcctcatcctgctgggtctgagtgggactcaagggatccctctcgcaaggacggtccgctgcaactgcatccatatcgatgacgggccagtgagaatgagggccatagggaagcttgaaatcatccctgcgagcctatcctgcccacgtgttgagatcattgccacgatgaaaaagaatgatgagcagagatgtctgaatccggaatctaagaccatcaagaatttaatgaaagcgtttagccaaaaaaggtctaaaagggctcctgagggcagaggaagtctgctaacatgcggtgacgtcgaggagaatcccgggcctgcttctgacaacccaattttggagtttcttgaagcagaaaatgatctagtcactctggcctctctctggaagatggtgcactctgttcaacagacctggagaaagtatgtgaagaacgatgatttttggcccaatttactcagcgagctagtgggggaaggctctgtcgccttggccgccacgctatccaaccaagcttcagtaaaggctcttttgggcctgcactttctctctcgggggctcaattacactgacttttactctttactgatagagaaatgctctagtttctttaccgtagaaccacctcctccaccagctgaaaacctgatgaccaagccctcagtgaagtcgaaattccgaaaactgtttaagatgcaaggacccatggacaaagtcaaagactggaaccaaatagctgccggcttgaagaattttcaatttgttcgtgacctagtcaaagaggtggtcgattggctgcaggcctggatcaacaaagagaaagccagccctgtcctccagtaccagttggagatgaagaagctcgggcctgtggccttggctcatgacgctttcatggctggttccgggccccctcttagcgacgaccagattgaatacctccagaacctcaaatctcttgccctaacactggggaagactaatttggcccaaagtctcaccactatgatcaatgccaaacaaagttcagcccaacgagttgaacccgttgtggtggtccttagaggcaagccgggatgcggcaagagcttggcctctacgttgattgcccaggctgtgtccaagcgcctctatggctcccaaagtgtatattctcttcccccagatccagatttcttcgatggatacaaaggacagttcgtgaccttgatggatgatttgggacaaaacccggatggacaagatttctccaccttttgtcagatggtgtcgaccgcccaatttctccccaacatggcggaccttgcagagaaagggcgtccctttacctccaatctcatcattgcaactacaaatctcccccacttcagtcctgtcaccattgctgatccttctgcagtctctcgccgtatcaactacgatctgactctagaagtatctgaggcctacaagaaacacacacggctgaattttgacttggctttcaggcgcacagacgccccccccatttatccttttgctgcccatgtgccctttgtggacgtagctgtgcgcttcaaaaatggtcaccagaattttaatctcctagagttggtcgattccatttgtacagacattcgagccaagcaacaaggtgcccgaaacatgcagactctggttctacagagccccaacgagaatgatgacacccccgtcgacgaggcgttgggtagagttctctcccccgctgcggtcgatgaggcgcttgtcgacctcactccagaggccgacccggttggccgtttggctattcttgccaagctaggtcttgccctagctgcggtcacccctggtctgataatcttggcagtgggactctacaggtacttctctggctctgatgcagaccaagaagaaacagaaagtgagggatctgtcaaggcacccaggagcgaaaatgcttatgacggcccgaagaaaaactctaagccccctggagcactctctctcatggaaatgcaacagcccaacgtggacatgggctttgaggctgcggtcgctaagaaagtggtcgtccccattaccttcatggttcccaacagaccttctgggcttacacagtccgctcttctggtgaccggccggaccttcctaatcaatgaacatacatggtccaatccctcctggaccagcttcacaatccgcggtgaggtacacactcgtgatgagcccttccaaacggttcatttcactcaccacggtattcccacagatctgatgatggtacgtctcggaccgggcaattctttccctaacaatctagacaagtttggacttgaccagatgccggcacgcaactcccgtgtggttggcgtttcgtccagttacggaaacttcttcttctctggaaatttcctcggatttgttgattccatcacctctgaacaaggaacttacgcaagactctttaggtacagggtgacgacctacaaaggatggtgcggctcggccctggtctgtgaggccggtggcgtccgacgcatcattggcctgcattctgctggcgccgccggtatcggcgccgggacctatatctcaaaattaggactaatcaaagccctgaaacacctcggtgaacctttggccacaatgcaaggactgatgactgaattagagcctggaatcaccgtacatgtaccccggaaatccaaattgagaaagacgaccgcacacgcggtgtacaaaccggagtttgagcctgctgtgttgtcaaaatttgatcccagactgaacaaggatgttgacttggatgaagtaatttggtctaaacacactgccaatgtcccttaccaacctcctttgttctacacatacatgtcagagtacgctcatcgagtcttctccttcttggggaaagacaatgacattctgaccgtcaaagaagcaattctgggcatccccggactagaccccatggatccccacacagctccgggtctgccttacgccatcaacggccttcgacgtactgatctcgtcgattttgtgaacggtacagtagatgcggcgctggctgtacaaatccagaaattcttagacggtgactactctgaccatgtcttccaaacttttctgaaagatgagatcagaccctcagagaaagtccgagcgggaaaaacccgcattgttgatgtgccctccctggcgcattgcattgtgggcagaatgttgcttgggcgctttgctgccaagtttcaatcccatcctggctttctcctcggctctgctatcgggtctgaccctgatgttttctggaccgtcataggggctcaactcgaggggagaaagaacacgtatgacgtggactacagtgcctttgactcttcacacggcactggctccttcgaggctctcatctctcactttttcaccgtggacaatggttttagccctgcgctgggaccgtatctcagatccctggctgtctcggtgcacgcttacggcgagcgtcgcatcaagattaccggtggcctcccctccggttgtgccgcgaccagcctgctgaacacagtgctcaacaatgtgatcatcaggactgctctggcattgacttacaaggaatttgaatatgacatggttgatatcatcgcctacggtgacgaccttctggttggcacggattacgatctggacttcaatgaggtggcacgacgcgctgccaagttggggtataagatgactcctgccaacaagggttctgtcttccctccgacttcctctctttccgatgctgtttttctaaagcgcaaattcgtccaaaacaacgacggcttatacaaaccagttatggatttaaagaatttggaagccatgctctcctacttcaaaccaggaacactactcgagaagctgcaatctgtttctatgttggctcaacattctggaaaagaagaatatgatagattgatgcaccccttcgctgactacggtgccgtaccgagtcacgagtacctgcaggcaagatggagggccttgttcgactgacccagatagcccaaggcgcttcggtgctgccggcgattctgggagaactcagtcggaacagaaaagggaaaaaaaaaaaaaaaaaaaaaaaaaaaaaaggccggcatggtcccagcctcctcgctggcgccggctgggcaacatgcttcggcatggcgaatgggacgcggccgctcgagtctagagggcccgtttaaacccgctgatcagcctcgactgtgccttctagttgccagccatctgttgtttgcccctcccccgtgccttccttgaccctggaaggtgccactcccactgtcctttcctaataaaatgaggaaattgcatcgcattgtctgagtaggtgtcattctattctggggggtggggtggggcaggacagcaagggggaggattgggaagacaatagcaggcatgctggggatgcggtgggctctatggtgctggcgtttttccataggctc

SEQ ID NO: 52 - RNA, 7034 nt, Artificial Sequence
  SVV-Trunc10m FAP CD3 BiTE 6His P2A-CXCL10 RNA
uuugaaauggggggcugggcccugaugcccaguccuuccuuuccccuuccgggggguuaaccggcuguguuugcuagaggcacagaggggcaacauccaaccugcuuuugcggggaacggugcggcuccgauuccugcgucgccaaagguguuagcgcacccaaacggcgcaccuaccaauguuauugguguggucugcgaguucuagccuacucguuucucccccgaccauucacucacccacgaaaaguguguuguaaccauaagauuuaacccccgcacgggaugugcgauaaccguaagacuggcucaagcgcggaaagcgcuguaaccacaugcuguuagucccuuuauggcugcaagauggcuacccaccucggaucacugaacuggagcucgacccuccuuaguaagggaaccgagaggccuucgugcaacaagcuccgacacagaguccacgugacugcuaccaccaugaguacaugguucuccccucucgacccaggacuucuuuuugaauauccacggcucgauccagaggguggggcaugaccccuagcauagcgagcuacagcgggaacuguagcuaggccuuagcgugccuuggauacugccugauagggcgacggccuagucgugucgguucuauagguagcacauacaaauaugcagaacucucauuuuucuuucgauacagccucuggcaccuuugaagauguaaccggaacaaaagucaagaucguugaauaccccagaucggugaacaaugguguuuacgauucgucuacucauuuggagauacugaaccuacagggugaaauugaaauuuuaaggucuuucaaugaauaccaaauucgcgccgccaaacaacaacucggacuggacaucguguacgaacuacaggguaauguucagacaacgucaaagaaugauuuugauucccguggcaauaaugguaacaugaccuucaauuacuacgcaaacacuuaucagaauucaguagacuucucgaccuccucgucggcgucaggcgccggaccugggaacucucggggcggauuagcgggucuccucacaaauuucaguggaaucuugaacccucuuggcuaccucaaagaucacaacaccgaagaaauggaaaacucugcugaucgagucacaacgcaaacggcgggcaacacugccauaaacacgcaaucaucauuggguguguugugugccuacguugaagacccgaccaaaucugauccuccguccagcucuggcgauaucgagaccaaucccgggccgauguacaggaugcaacuccugucuugcauugcacuaagucuugcacuugucacgaauucacaggugcagcuccagcagaguggcgcagagcucgcucgcccaggcgcuucugugaaucugaguuguaaggccuccggauauacuuuuacgaacaacggcaucaacuggcugaagcagcggaccggccagggccuggaguggaucggcgaaauauacccccgguccacaaacacucucuauaacgagaaguuuaagggcaaagcaacucugaccgcggacagguccucuaacacagccuauauggagcugagaagcuugacgagugaggacuccgcugucuauuuuugcgcccgaacucugaccgcuccuuuugcuuuuuggggccagggcacgcucgugaccguaagugcgggcuccacuagcgguuccggcaaaccuggcagcggagaaggcagcaccaaagggcagaucguccugacgcagucuccagccaucaugagcgccucacccggcgaaaaggugaccaugaccugcucagccucuucuggugugaauuucaugcacugguaccagcaaaaaagugggaccuccccuaaaagguggaucuucgauaccagcaaacuggcuucuggcguucccgcaagguuuagcggcucugguuccggcacaucauacagccugacgaucagcagcauggaggcagaagacgcagcuaccuauuacugccagcaauggagcuuuaacccaccuacuuucggaggaggaacaaagcuggaaauaaaaagagguggugguggaucagaggugcagcugguggagucugggggaggcuuggugcagccuggaaagucccugaaacucuccugugaggccucuggauucaccuucagcggcuauggcaugcacuggguccgccaggcuccagggagggggcuggagucggucgcauacauuacuaguaguaguauuaauaucaaauaugcugacgcugugaaaggccgguucaccgucuccagagacaaugccaagaacuuacuguuucuacaaaugaacauucucaagucugaggacacagccauguacuacugugcaagauucgacugggacaaaaauuacuggggccaaggaaccauggucaccgucuccucagguggugguggaucagguggaggcggaaguggagguggcggauccgacauccagaugacccagucuccaucaucacugccugccucccugggagacagagucacuaucaauugucaggccagucaggacauuagcaauuauuuaaacugguaccagcagaaaccagggaaagcuccuaagcuccugaucuauuauacaaauaaauuggcagauggagucccaucaagguucaguggcagugguucugggagagauucuucuuucacuaucagcagccuggaauccgaagauauuggaucuuauuacugucaacaguauuauaacuauccguggacguucggaccuggcaccaagcuggaaaucaaacggcaccaccaucaucaccacgccaccaacuucagccugcugaagcaggccggcgacguggaggagaaccccggccccaugaacccaagugcugccgucauuuucugccucauccugcugggucugagugggacucaagggaucccucucgcaaggacgguccgcugcaacugcauccauaucgaugacgggccagugagaaugagggccauagggaagcuugaaaucaucccugcgagccuauccugcccacguguugagaucauugccacgaugaaaaagaaugaugagcagagaugucugaauccggaaucuaagaccaucaagaauuuaaugaaagcguuuagccaaaaaaggucuaaaagggcuccugagggcagaggaagucugcuaacaugcggugacgucgaggagaaucccgggccugcuucugacaacccaauuuuggaguuucuugaagcagaaaaugaucuagucacucuggccucucucuggaagauggugcacucuguucaacagaccuggagaaaguaugugaagaacgaugauuuuuggcccaauuuacucagcgagcuagugggggaaggcucugucgccuuggccgccacgcuauccaaccaagcuucaguaaaggcucuuuugggccugcacuuucucucucgggggcucaauuacacugacuuuuacucuuuacugauagagaaaugcucuaguuucuuuaccguagaaccaccuccuccaccagcugaaaaccugaugaccaagcccucagugaagucgaaauuccgaaaacuguuuaagaugcaaggacccauggacaaagucaaagacuggaaccaaauagcugccggcuugaagaauuuucaauuuguucgugaccuagucaaagagguggucgauuggcugcaggccuggaucaacaaagagaaagccagcccuguccuccaguaccaguuggagaugaagaagcucgggccuguggccuuggcucaugacgcuuucauggcugguuccgggcccccucuuagcgacgaccagauugaauaccuccagaaccucaaaucucuugcccuaacacuggggaagacuaauuuggcccaaagucucaccacuaugaucaaugccaaacaaaguucagcccaacgaguugaacccguuguggugguccuuagaggcaagccgggaugcggcaagagcuuggccucuacguugauugcccaggcuguguccaagcgccucuauggcucccaaaguguauauucucuucccccagauccagauuucuucgauggauacaaaggacaguucgugaccuugauggaugauuugggacaaaacccggauggacaagauuucuccaccuuuugucagauggugucgaccgcccaauuucuccccaacauggcggaccuugcagagaaagggcgucccuuuaccuccaaucucaucauugcaacuacaaaucucccccacuucaguccugucaccauugcugauccuucugcagucucucgccguaucaacuacgaucugacucuagaaguaucugaggccuacaagaaacacacacggcugaauuuugacuuggcuuucaggcgcacagacgccccccccauuuauccuuuugcugcccaugugcccuuuguggacguagcugugcgcuucaaaaauggucaccagaauuuuaaucuccuagaguuggucgauuccauuuguacagacauucgagccaagcaacaaggugcccgaaacaugcagacucugguucuacagagccccaacgagaaugaugacacccccgucgacgaggcguuggguagaguucucucccccgcugcggucgaugaggcgcuugucgaccucacuccagaggccgacccgguuggccguuuggcuauucuugccaagcuaggucuugcccuagcugcggucaccccuggucugauaaucuuggcagugggacucuacagguacuucucuggcucugaugcagaccaagaagaaacagaaagugagggaucugucaaggcacccaggagcgaaaaugcuuaugacggcccgaagaaaaacucuaagcccccuggagcacucucucucauggaaaugcaacagcccaacguggacaugggcuuugaggcugcggucgcuaagaaaguggucguccccauuaccuucaugguucccaacagaccuucugggcuuacacaguccgcucuucuggugaccggccggaccuuccuaaucaaugaacauacaugguccaaucccuccuggaccagcuucacaauccgcggugagguacacacucgugaugagcccuuccaaacgguucauuucacucaccacgguauucccacagaucugaugaugguacgucucggaccgggcaauucuuucccuaacaaucuagacaaguuuggacuugaccagaugccggcacgcaacucccgugugguuggcguuucguccaguuacggaaacuucuucuucucuggaaauuuccucggauuuguugauuccaucaccucugaacaaggaacuuacgcaagacucuuuagguacagggugacgaccuacaaaggauggugcggcucggcccuggucugugaggccgguggcguccgacgcaucauuggccugcauucugcuggcgccgccgguaucggcgccgggaccuauaucucaaaauuaggacuaaucaaagcccugaaacaccucggugaaccuuuggccacaaugcaaggacugaugacugaauuagagccuggaaucaccguacauguaccccggaaauccaaauugagaaagacgaccgcacacgcgguguacaaaccggaguuugagccugcuguguugucaaaauuugaucccagacugaacaaggauguugacuuggaugaaguaauuuggucuaaacacacugccaaugucccuuaccaaccuccuuuguucuacacauacaugucagaguacgcucaucgagucuucuccuucuuggggaaagacaaugacauucugaccgucaaagaagcaauucugggcauccccggacuagaccccauggauccccacacagcuccgggucugccuuacgccaucaacggccuucgacguacugaucucgucgauuuugugaacgguacaguagaugcggcgcuggcuguacaaauccagaaauucuuagacggugacuacucugaccaugucuuccaaacuuuucugaaagaugagaucagacccucagagaaaguccgagcgggaaaaacccgcauuguugaugugcccucccuggcgcauugcauugugggcagaauguugcuugggcgcuuugcugccaaguuucaaucccauccuggcuuucuccucggcucugcuaucgggucugacccugauguuuucuggaccgucauaggggcucaacucgaggggagaaagaacacguaugacguggacuacagugccuuugacucuucacacggcacuggcuccuucgaggcucucaucucucacuuuuucaccguggacaaugguuuuagcccugcgcugggaccguaucucagaucccuggcugucucggugcacgcuuacggcgagcgucgcaucaagauuaccgguggccuccccuccgguugugccgcgaccagccugcugaacacagugcucaacaaugugaucaucaggacugcucuggcauugacuuacaaggaauuugaauaugacaugguugauaucaucgccuacggugacgaccuucugguuggcacggauuacgaucuggacuucaaugagguggcacgacgcgcugccaaguugggguauaagaugacuccugccaacaaggguucugucuucccuccgacuuccucucuuuccgaugcuguuuuucuaaagcgcaaauucguccaaaacaacgacggcuuauacaaaccaguuauggauuuaaagaauuuggaagccaugcucuccuacuucaaaccaggaacacuacucgagaagcugcaaucuguuucuauguuggcucaacauucuggaaaagaagaauaugauagauugaugcaccccuucgcugacuacggugccguaccgagucacgaguaccugcaggcaagauggagggccuuguucgacugacccagauagcccaaggcgcuucggugcugccggcgauucugggagaacucagucggaacagaaaagggaaaaaaaaaaaaaaaaaaaaaaaaaaaaaa

SEQ ID NO: 53 - DNA, 9586 bp, Artificial Sequence
  SVV-Trunc10m FAP CD3 BiTE 6His T2A no furin-CXCL10
cgcccccctgacgagcatcacaaaaatcgacgctcaagtcagaggtggcgaaacccgacaggactataaagataccaggcgtttccccctggaagctccctcgtgcgctctcctgttccgaccctgccgcttaccggatacctgtccgcctttctcccttcgggaagcgtggcgctttctcatagctcacgctgtaggtatctcagttcggtgtaggtcgttcgctccaagctgggctgtgtgcacgaaccccccgttcagcccgaccgctgcgccttatccggtaactatcgtcttgagtccaacccggtaagacacgacttatcgccactggcagcagccactggtaacaggattagcagagcgaggtatgtaggcggtgctacagagttcttgaagtggtggcctaactacggctacactagaagaacagtatttggtatctgcgctctgctgaagccagttaccttcggaaaaagagttggtagctcttgatccggcaaacaaaccaccgctggtagcggtggtttttttgtttgcaagcagcagattacgcgcagaaaaaaaggatctcaagaagatccttttaaaaaaattcatccaacaaacgataaaatgcaatacgttgactatctggtgctgcaataccatataaaactaaaaaacgatctgcccattcaccacctaattcttctgcaatatcacgagttgctaatgcaatatcttgataacgatctgcaacacctaaacgaccacaatcaatgaaaccactaaaacgaccattttcaaccataatatttggtaaacatgcatcaccatgagtaacaactaaatcttcaccatctggcatacttgcttttaaacgtgcaaacaattctgctggtgctaaaccttgatgttcttcatctaaatcatcttgatcaactaaacctgcttccatacgagtacgtgcacgttcaatacgatgttttgcttgatgatcaaatggacaagttgctggatctaaagtatgtaaacgacgcattgcatctgccataatactaactttttctgctggtgctaaatgactagataacaaatcttgacctggaacttcacctaacaacaaccaatcacgacctgcttcagtaacaacatctaaaactgctgcacatggaacaccagtagttgctaaccaacttaaacgtgctgcttcatcttgtaattcatttaatgcaccacttaaatcagttttaacaaacaaaactggacgaccttgtgcacttaaacgaaaaactgctgcatcagaacaaccaatagtttgttgtgcccaatcataaccaaacaaacgttcaacccatgctgctggactacctgcatgtaaaccatcttgttcaatcatactcttcctttttcaatattattgaagcatttatcagggttattgtctcatgagcggatacatatttgaagaattcacattgattattgactagttattaatagtaatcaattacggggtcattagttcatagcccatatatggagttccgcgttacataacttacggtaaatggcccgcctggctgaccgcccaacgacccccgcccattgacgtcaataatgacgtatgttcccatagtaacgccaatagggactttccattgacgtcaatgggtggagtatttacggtaaactgcccacttggcagtacatcaagtgtatcatatgccaagtacgccccctattgacgtcaatgacggtaaatggcccgcctggcattatgcccagtacatgaccttatgggactttcctacttggcagtacatctacgtattagtcatcgctattaccatggtgatgcggttttggcagtacatcaatgggcgtggatagcggtttgactcacggggatttccaagtctccaccccattgacgtcaatgggagtttgttttggcaccaaaatcaacgggactttccaaaatgtcgtaacaactccgccccattgacgcaaatgggcggtaggcgtgtacggtgggaggtctatataagcagagctctctggctaactagagaacccactgcttactggcttatcgaaattaatacgactcactatagggagacccaagctggctagcgtttaaacttaagcttggtaccttatcaaactgatgagtccgtgaggacgaaacgagtaagctcgtctttgaaatggggggctgggccctgatgcccagtccttcctttccccttccggggggttaaccggctgtgtttgctagaggcacagaggggcaacatccaacctgcttttgcggggaacggtgcggctccgattcctgcgtcgccaaaggtgttagcgcacccaaacggcgcacctaccaatgttattggtgtggtctgcgagttctagcctactcgtttctcccccgaccattcactcacccacgaaaagtgtgttgtaaccataagatttaacccccgcacgggatgtgcgataaccgtaagactggctcaagcgcggaaagcgctgtaaccacatgctgttagtccctttatggctgcaagatggctacccacctcggatcactgaactggagctcgaccctccttagtaagggaaccgagaggccttcgtgcaacaagctccgacacagagtccacgtgactgctaccaccatgagtacatggttctcccctctcgacccaggacttctttttgaatatccacggctcgatccagagggtggggcatgacccctagcatagcgagctacagcgggaactgtagctaggccttagcgtgccttggatactgcctgatagggcgacggcctagtcgtgtcggttctataggtagcacatacaaatatgcagaactctcatttttctttcgatacagcctctggcacctttgaagatgtaaccggaacaaaagtcaagatcgttgaataccccagatcggtgaacaatggtgtttacgattcgtctactcatttggagatactgaacctacagggtgaaattgaaattttaaggtctttcaatgaataccaaattcgcgccgccaaacaacaactcggactggacatcgtgtacgaactacagggtaatgttcagacaacgtcaaagaatgattttgattcccgtggcaataatggtaacatgaccttcaattactacgcaaacacttatcagaattcagtagacttctcgacctcctcgtcggcgtcaggcgccggacctgggaactctcggggcggattagcgggtctcctcacaaatttcagtggaatcttgaaccctcttggctacctcaaagatcacaacaccgaagaaatggaaaactctgctgatcgagtcacaacgcaaacggcgggcaacactgccataaacacgcaatcatcattgggtgtgttgtgtgcctacgttgaagacccgaccaaatctgatcctccgtccagctctggcgatatcgagaccaatcccgggccgatgtacaggatgcaactcctgtcttgcattgcactaagtcttgcacttgtcacgaattcacaggtgcagctccagcagagtggcgcagagctcgctcgcccaggcgcttctgtgaatctgagttgtaaggcctccggatatacttttacgaacaacggcatcaactggctgaagcagcggaccggccagggcctggagtggatcggcgaaatatacccccggtccacaaacactctctataacgagaagtttaagggcaaagcaactctgaccgcggacaggtcctctaacacagcctatatggagctgagaagcttgacgagtgaggactccgctgtctatttttgcgcccgaactctgaccgctccttttgctttttggggccagggcacgctcgtgaccgtaagtgcgggctccactagcggttccggcaaacctggcagcggagaaggcagcaccaaagggcagatcgtcctgacgcagtctccagccatcatgagcgcctcacccggcgaaaaggtgaccatgacctgctcagcctcttctggtgtgaatttcatgcactggtaccagcaaaaaagtgggacctcccctaaaaggtggatcttcgataccagcaaactggcttctggcgttcccgcaaggtttagcggctctggttccggcacatcatacagcctgacgatcagcagcatggaggcagaagacgcagctacctattactgccagcaatggagctttaacccacctactttcggaggaggaacaaagctggaaataaaaagaggtggtggtggatcagaggtgcagctggtggagtctgggggaggcttggtgcagcctggaaagtccctgaaactctcctgtgaggcctctggattcaccttcagcggctatggcatgcactgggtccgccaggctccagggagggggctggagtcggtcgcatacattactagtagtagtattaatatcaaatatgctgacgctgtgaaaggccggttcaccgtctccagagacaatgccaagaacttactgtttctacaaatgaacattctcaagtctgaggacacagccatgtactactgtgcaagattcgactgggacaaaaattactggggccaaggaaccatggtcaccgtctcctcaggtggtggtggatcaggtggaggcggaagtggaggtggcggatccgacatccagatgacccagtctccatcatcactgcctgcctccctgggagacagagtcactatcaattgtcaggccagtcaggacattagcaattatttaaactggtaccagcagaaaccagggaaagctcctaagctcctgatctattatacaaataaattggcagatggagtcccatcaaggttcagtggcagtggttctgggagagattcttctttcactatcagcagcctggaatccgaagatattggatcttattactgtcaacagtattataactatccgtggacgttcggacctggcaccaagctggaaatcaaacggcaccaccatcatcaccacgaaggcaggggatccctcctgacatgtggagatgtggaagagaatcctggtccaatgaacccaagtgctgccgtcattttctgcctcatcctgctgggtctgagtgggactcaagggatccctctcgcaaggacggtccgctgcaactgcatccatatcgatgacgggccagtgagaatgagggccatagggaagcttgaaatcatccctgcgagcctatcctgcccacgtgttgagatcattgccacgatgaaaaagaatgatgagcagagatgtctgaatccggaatctaagaccatcaagaatttaatgaaagcgtttagccaaaaaaggtctaaaagggctcctgagggcagaggaagtctgctaacatgcggtgacgtcgaggagaatcccgggcctgcttctgacaacccaattttggagtttcttgaagcagaaaatgatctagtcactctggcctctctctggaagatggtgcactctgttcaacagacctggagaaagtatgtgaagaacgatgatttttggcccaatttactcagcgagctagtgggggaaggctctgtcgccttggccgccacgctatccaaccaagcttcagtaaaggctcttttgggcctgcactttctctctcgggggctcaattacactgacttttactctttactgatagagaaatgctctagtttctttaccgtagaaccacctcctccaccagctgaaaacctgatgaccaagccctcagtgaagtcgaaattccgaaaactgtttaagatgcaaggacccatggacaaagtcaaagactggaaccaaatagctgccggcttgaagaattttcaatttgttcgtgacctagtcaaagaggtggtcgattggctgcaggcctggatcaacaaagagaaagccagccctgtcctccagtaccagttggagatgaagaagctcgggcctgtggccttggctcatgacgctttcatggctggttccgggccccctcttagcgacgaccagattgaatacctccagaacctcaaatctcttgccctaacactggggaagactaatttggcccaaagtctcaccactatgatcaatgccaaacaaagttcagcccaacgagttgaacccgttgtggtggtccttagaggcaagccgggatgcggcaagagcttggcctctacgttgattgcccaggctgtgtccaagcgcctctatggctcccaaagtgtatattctcttcccccagatccagatttcttcgatggatacaaaggacagttcgtgaccttgatggatgatttgggacaaaacccggatggacaagatttctccaccttttgtcagatggtgtcgaccgcccaatttctccccaacatggcggaccttgcagagaaagggcgtccctttacctccaatctcatcattgcaactacaaatctcccccacttcagtcctgtcaccattgctgatccttctgcagtctctcgccgtatcaactacgatctgactctagaagtatctgaggcctacaagaaacacacacggctgaattttgacttggctttcaggcgcacagacgccccccccatttatccttttgctgcccatgtgccctttgtggacgtagctgtgcgcttcaaaaatggtcaccagaattttaatctcctagagttggtcgattccatttgtacagacattcgagccaagcaacaaggtgcccgaaacatgcagactctggttctacagagccccaacgagaatgatgacacccccgtcgacgaggcgttgggtagagttctctcccccgctgcggtcgatgaggcgcttgtcgacctcactccagaggccgacccggttggccgtttggctattcttgccaagctaggtcttgccctagctgcggtcacccctggtctgataatcttggcagtgggactctacaggtacttctctggctctgatgcagaccaagaagaaacagaaagtgagggatctgtcaaggcacccaggagcgaaaatgcttatgacggcccgaagaaaaactctaagccccctggagcactctctctcatggaaatgcaacagcccaacgtggacatgggctttgaggctgcggtcgctaagaaagtggtcgtccccattaccttcatggttcccaacagaccttctgggcttacacagtccgctcttctggtgaccggccggaccttcctaatcaatgaacatacatggtccaatccctcctggaccagcttcacaatccgcggtgaggtacacactcgtgatgagcccttccaaacggttcatttcactcaccacggtattcccacagatctgatgatggtacgtctcggaccgggcaattctttccctaacaatctagacaagtttggacttgaccagatgccggcacgcaactcccgtgtggttggcgtttcgtccagttacggaaacttcttcttctctggaaatttcctcggatttgttgattccatcacctctgaacaaggaacttacgcaagactctttaggtacagggtgacgacctacaaaggatggtgcggctcggccctggtctgtgaggccggtggcgtccgacgcatcattggcctgcattctgctggcgccgccggtatcggcgccgggacctatatctcaaaattaggactaatcaaagccctgaaacacctcggtgaacctttggccacaatgcaaggactgatgactgaattagagcctggaatcaccgtacatgtaccccggaaatccaaattgagaaagacgaccgcacacgcggtgtacaaaccggagtttgagcctgctgtgttgtcaaaatttgatcccagactgaacaaggatgttgacttggatgaagtaatttggtctaaacacactgccaatgtcccttaccaacctcctttgttctacacatacatgtcagagtacgctcatcgagtcttctccttcttggggaaagacaatgacattctgaccgtcaaagaagcaattctgggcatccccggactagaccccatggatccccacacagctccgggtctgccttacgccatcaacggccttcgacgtactgatctcgtcgattttgtgaacggtacagtagatgcggcgctggctgtacaaatccagaaattcttagacggtgactactctgaccatgtcttccaaacttttctgaaagatgagatcagaccctcagagaaagtccgagcgggaaaaacccgcattgttgatgtgccctccctggcgcattgcattgtgggcagaatgttgcttgggcgctttgctgccaagtttcaatcccatcctggctttctcctcggctctgctatcgggtctgaccctgatgttttctggaccgtcataggggctcaactcgaggggagaaagaacacgtatgacgtggactacagtgcctttgactcttcacacggcactggctccttcgaggctctcatctctcactttttcaccgtggacaatggttttagccctgcgctgggaccgtatctcagatccctggctgtctcggtgcacgcttacggcgagcgtcgcatcaagattaccggtggcctcccctccggttgtgccgcgaccagcctgctgaacacagtgctcaacaatgtgatcatcaggactgctctggcattgacttacaaggaatttgaatatgacatggttgatatcatcgcctacggtgacgaccttctggttggcacggattacgatctggacttcaatgaggtggcacgacgcgctgccaagttggggtataagatgactcctgccaacaagggttctgtcttccctccgacttcctctctttccgatgctgtttttctaaagcgcaaattcgtccaaaacaacgacggcttatacaaaccagttatggatttaaagaatttggaagccatgctctcctacttcaaaccaggaacactactcgagaagctgcaatctgtttctatgttggctcaacattctggaaaagaagaatatgatagattgatgcaccccttcgctgactacggtgccgtaccgagtcacgagtacctgcaggcaagatggagggccttgttcgactgacccagatagcccaaggcgcttcggtgctgccggcgattctgggagaactcagtcggaacagaaaagggaaaaaaaaaaaaaaaaaaaaaaaaaaaaaaggccggcatggtcccagcctcctcgctggcgccggctgggcaacatgcttcggcatggcgaatgggacgcggccgctcgagtctagagggcccgtttaaacccgctgatcagcctcgactgtgccttctagttgccagccatctgttgtttgcccctcccccgtgccttccttgaccctggaaggtgccactcccactgtcctttcctaataaaatgaggaaattgcatcgcattgtctgagtaggtgtcattctattctggggggtggggtggggcaggacagcaagggggaggattgggaagacaatagcaggcatgctggggatgcggtgggctctatggtgctggcgtttttccataggctc

SEQ ID NO: 54 - RNA, 7031 nt, Artificial Sequence
  SVV-Trunc10m FAP CD3 BiTE 6His T2A no furin-CXCL10 RNA
uuugaaauggggggcugggcccugaugcccaguccuuccuuuccccuuccgggggguuaaccggcuguguuugcuagaggcacagaggggcaacauccaaccugcuuuugcggggaacggugcggcuccgauuccugcgucgccaaagguguuagcgcacccaaacggcgcaccuaccaauguuauugguguggucugcgaguucuagccuacucguuucucccccgaccauucacucacccacgaaaaguguguuguaaccauaagauuuaacccccgcacgggaugugcgauaaccguaagacuggcucaagcgcggaaagcgcuguaaccacaugcuguuagucccuuuauggcugcaagauggcuacccaccucggaucacugaacuggagcucgacccuccuuaguaagggaaccgagaggccuucgugcaacaagcuccgacacagaguccacgugacugcuaccaccaugaguacaugguucuccccucucgacccaggacuucuuuuugaauauccacggcucgauccagaggguggggcaugaccccuagcauagcgagcuacagcgggaacuguagcuaggccuuagcgugccuuggauacugccugauagggcgacggccuagucgugucgguucuauagguagcacauacaaauaugcagaacucucauuuuucuuucgauacagccucuggcaccuuugaagauguaaccggaacaaaagucaagaucguugaauaccccagaucggugaacaaugguguuuacgauucgucuacucauuuggagauacugaaccuacagggugaaauugaaauuuuaaggucuuucaaugaauaccaaauucgcgccgccaaacaacaacucggacuggacaucguguacgaacuacaggguaauguucagacaacgucaaagaaugauuuugauucccguggcaauaaugguaacaugaccuucaauuacuacgcaaacacuuaucagaauucaguagacuucucgaccuccucgucggcgucaggcgccggaccugggaacucucggggcggauuagcgggucuccucacaaauuucaguggaaucuugaacccucuuggcuaccucaaagaucacaacaccgaagaaauggaaaacucugcugaucgagucacaacgcaaacggcgggcaacacugccauaaacacgcaaucaucauuggguguguugugugccuacguugaagacccgaccaaaucugauccuccguccagcucuggcgauaucgagaccaaucccgggccgauguacaggaugcaacuccugucuugcauugcacuaagucuugcacuugucacgaauucacaggugcagcuccagcagaguggcgcagagcucgcucgcccaggcgcuucugugaaucugaguuguaaggccuccggauauacuuuuacgaacaacggcaucaacuggcugaagcagcggaccggccagggccuggaguggaucggcgaaauauacccccgguccacaaacacucucuauaacgagaaguuuaagggcaaagcaacucugaccgcggacagguccucuaacacagccuauauggagcugagaagcuugacgagugaggacuccgcugucuauuuuugcgcccgaacucugaccgcuccuuuugcuuuuuggggccagggcacgcucgugaccguaagugcgggcuccacuagcgguuccggcaaaccuggcagcggagaaggcagcaccaaagggcagaucguccugacgcagucuccagccaucaugagcgccucacccggcgaaaaggugaccaugaccugcucagccucuucuggugugaauuucaugcacugguaccagcaaaaaagugggaccuccccuaaaagguggaucuucgauaccagcaaacuggcuucuggcguucccgcaagguuuagcggcucugguuccggcacaucauacagccugacgaucagcagcauggaggcagaagacgcagcuaccuauuacugccagcaauggagcuuuaacccaccuacuuucggaggaggaacaaagcuggaaauaaaaagagguggugguggaucagaggugcagcugguggagucugggggaggcuuggugcagccuggaaagucccugaaacucuccugugaggccucuggauucaccuucagcggcuauggcaugcacuggguccgccaggcuccagggagggggcuggagucggucgcauacauuacuaguaguaguauuaauaucaaauaugcugacgcugugaaaggccgguucaccgucuccagagacaaugccaagaacuuacuguuucuacaaaugaacauucucaagucugaggacacagccauguacuacugugcaagauucgacugggacaaaaauuacuggggccaaggaaccauggucaccgucuccucagguggugguggaucagguggaggcggaaguggagguggcggauccgacauccagaugacccagucuccaucaucacugccugccucccugggagacagagucacuaucaauugucaggccagucaggacauuagcaauuauuuaaacugguaccagcagaaaccagggaaagcuccuaagcuccugaucuauuauacaaauaaauuggcagauggagucccaucaagguucaguggcagugguucugggagagauucuucuuucacuaucagcagccuggaauccgaagauauuggaucuuauuacugucaacaguauuauaacuauccguggacguucggaccuggcaccaagcuggaaaucaaacggcaccaccaucaucaccacgaaggcaggggaucccuccugacauguggagauguggaagagaauccugguccaaugaacccaagugcugccgucauuuucugccucauccugcugggucugagugggacucaagggaucccucucgcaaggacgguccgcugcaacugcauccauaucgaugacgggccagugagaaugagggccauagggaagcuugaaaucaucccugcgagccuauccugcccacguguugagaucauugccacgaugaaaaagaaugaugagcagagaugucugaauccggaaucuaagaccaucaagaauuuaaugaaagcguuuagccaaaaaaggucuaaaagggcuccugagggcagaggaagucugcuaacaugcggugacgucgaggagaaucccgggccugcuucugacaacccaauuuuggaguuucuugaagcagaaaaugaucuagucacucuggccucucucuggaagauggugcacucuguucaacagaccuggagaaaguaugugaagaacgaugauuuuuggcccaauuuacucagcgagcuagugggggaaggcucugucgccuuggccgccacgcuauccaaccaagcuucaguaaaggcucuuuugggccugcacuuucucucucgggggcucaauuacacugacuuuuacucuuuacugauagagaaaugcucuaguuucuuuaccguagaaccaccuccuccaccagcugaaaaccugaugaccaagcccucagugaagucgaaauuccgaaaacuguuuaagaugcaaggacccauggacaaagucaaagacuggaaccaaauagcugccggcuugaagaauuuucaauuuguucgugaccuagucaaagagguggucgauuggcugcaggccuggaucaacaaagagaaagccagcccuguccuccaguaccaguuggagaugaagaagcucgggccuguggccuuggcucaugacgcuuucauggcugguuccgggcccccucuuagcgacgaccagauugaauaccuccagaaccucaaaucucuugcccuaacacuggggaagacuaauuuggcccaaagucucaccacuaugaucaaugccaaacaaaguucagcccaacgaguugaacccguuguggugguccuuagaggcaagccgggaugcggcaagagcuuggccucuacguugauugcccaggcuguguccaagcgccucuauggcucccaaaguguauauucucuucccccagauccagauuucuucgauggauacaaaggacaguucgugaccuugauggaugauuugggacaaaacccggauggacaagauuucuccaccuuuugucagauggugucgaccgcccaauuucuccccaacauggcggaccuugcagagaaagggcgucccuuuaccuccaaucucaucauugcaacuacaaaucucccccacuucaguccugucaccauugcugauccuucugcagucucucgccguaucaacuacgaucugacucuagaaguaucugaggccuacaagaaacacacacggcugaauuuugacuuggcuuucaggcgcacagacgccccccccauuuauccuuuugcugcccaugugcccuuuguggacguagcugugcgcuucaaaaauggucaccagaauuuuaaucuccuagaguuggucgauuccauuuguacagacauucgagccaagcaacaaggugcccgaaacaugcagacucugguucuacagagccccaacgagaaugaugacacccccgucgacgaggcguuggguagaguucucucccccgcugcggucgaugaggcgcuugucgaccucacuccagaggccgacccgguuggccguuuggcuauucuugccaagcuaggucuugcccuagcugcggucaccccuggucugauaaucuuggcagugggacucuacagguacuucucuggcucugaugcagaccaagaagaaacagaaagugagggaucugucaaggcacccaggagcgaaaaugcuuaugacggcccgaagaaaaacucuaagcccccuggagcacucucucucauggaaaugcaacagcccaacguggacaugggcuuugaggcugcggucgcuaagaaaguggucguccccauuaccuucaugguucccaacagaccuucugggcuuacacaguccgcucuucuggugaccggccggaccuuccuaaucaaugaacauacaugguccaaucccuccuggaccagcuucacaauccgcggugagguacacacucgugaugagcccuuccaaacgguucauuucacucaccacgguauucccacagaucugaugaugguacgucucggaccgggcaauucuuucccuaacaaucuagacaaguuuggacuugaccagaugccggcacgcaacucccgugugguuggcguuucguccaguuacggaaacuucuucuucucuggaaauuuccucggauuuguugauuccaucaccucugaacaaggaacuuacgcaagacucuuuagguacagggugacgaccuacaaaggauggugcggcucggcccuggucugugaggccgguggcguccgacgcaucauuggccugcauucugcuggcgccgccgguaucggcgccgggaccuauaucucaaaauuaggacuaaucaaagcccugaaacaccucggugaaccuuuggccacaaugcaaggacugaugacugaauuagagccuggaaucaccguacauguaccccggaaauccaaauugagaaagacgaccgcacacgcgguguacaaaccggaguuugagccugcuguguugucaaaauuugaucccagacugaacaaggauguugacuuggaugaaguaauuuggucuaaacacacugccaaugucccuuaccaaccuccuuuguucuacacauacaugucagaguacgcucaucgagucuucuccuucuuggggaaagacaaugacauucugaccgucaaagaagcaauucugggcauccccggacuagaccccauggauccccacacagcuccgggucugccuuacgccaucaacggccuucgacguacugaucucgucgauuuugugaacgguacaguagaugcggcgcuggcuguacaaauccagaaauucuuagacggugacuacucugaccaugucuuccaaacuuuucugaaagaugagaucagacccucagagaaaguccgagcgggaaaaacccgcauuguugaugugcccucccuggcgcauugcauugugggcagaauguugcuugggcgcuuugcugccaaguuucaaucccauccuggcuuucuccucggcucugcuaucgggucugacccugauguuuucuggaccgucauaggggcucaacucgaggggagaaagaacacguaugacguggacuacagugccuuugacucuucacacggcacuggcuccuucgaggcucucaucucucacuuuuucaccguggacaaugguuuuagcccugcgcugggaccguaucucagaucccuggcugucucggugcacgcuuacggcgagcgucgcaucaagauuaccgguggccuccccuccgguugugccgcgaccagccugcugaacacagugcucaacaaugugaucaucaggacugcucuggcauugacuuacaaggaauuugaauaugacaugguugauaucaucgccuacggugacgaccuucugguuggcacggauuacgaucuggacuucaaugagguggcacgacgcgcugccaaguugggguauaagaugacuccugccaacaaggguucugucuucccuccgacuuccucucuuuccgaugcuguuuuucuaaagcgcaaauucguccaaaacaacgacggcuuauacaaaccaguuauggauuuaaagaauuuggaagccaugcucuccuacuucaaaccaggaacacuacucgagaagcugcaaucuguuucuauguuggcucaacauucuggaaaagaagaauaugauagauugaugcaccccuucgcugacuacggugccguaccgagucacgaguaccugcaggcaagauggagggccuuguucgacugacccagauagcccaaggcgcuucggugcugccggcgauucugggagaacucagucggaacagaaaagggaaaaaaaaaaaaaaaaaaaaaaaaaaaaaa

SEQ ID NO: 55 - DNA, 9834 bp, Artificial Sequence
  Viper-SVVTrunc10-IL-2 1xHIVPR IL-36g
ctgacggatggcctttttgcgtttctacaaactcttcctgttagttagttacttaagctcgggccccaaataatgattttattttgactgatagtgacctgttcgttgcaacaaattgataagcaatgcttttttataatgccaacattgattattgactagttattaatagtaatcaattacggggtcattagttcatagcccatatatggagttccgcgttacataacttacggtaaatggcccgcctggctgaccgcccaacgacccccgcccattgacgtcaataatgacgtatgttcccatagtaacgccaatagggactttccattgacgtcaatgggtggagtatttacggtaaactgcccacttggcagtacatcaagtgtatcatatgccaagtacgccccctattgacgtcaatgacggtaaatggcccgcctggcattatgcccagtacatgaccttatgggactttcctacttggcagtacatctacgtattagtcatcgctattaccatggtgatgcggttttggcagtacatcaatgggcgtggatagcggtttgactcacggggatttccaagtctccaccccattgacgtcaatgggagtttgttttggcaccaaaatcaacgggactttccaaaatgtcgtaacaactccgccccattgacgcaaatgggcggtaggcgtgtacggtgggaggtctatataagcagagctctctggctaactagagaacccactgcttactggcttatcgaaattaatacgactcactatagggagacccaagctggctagcgtttaaacttaagcttggtaccttatcaaactgatgagtccgtgaggacgaaacgagtaagctcgtctttgaaatggggggctgggccctgatgcccagtccttcctttccccttccggggggttaaccggctgtgtttgctagaggcacagaggggcaacatccaacctgcttttgcggggaacggtgcggctccgattcctgcgtcgccaaaggtgttagcgcacccaaacggcgcacctaccaatgttattggtgtggtctgcgagttctagcctactcgtttctcccccgaccattcactcacccacgaaaagtgtgttgtaaccataagatttaacccccgcacgggatgtgcgataaccgtaagactggctcaagcgcggaaagcgctgtaaccacatgctgttagtccctttatggctgcaagatggctacccacctcggatcactgaactggagctcgaccctccttagtaagggaaccgagaggccttcgtgcaacaagctccgacacagagtccacgtgactgctaccaccatgagtacatggttctcccctctcgacccaggacttctttttgaatatccacggctcgatccagagggtggggcatgacccctagcatagcgagctacagcgggaactgtagctaggccttagcgtgccttggatactgcctgatagggcgacggcctagtcgtgtcggttctataggtagcacatacaaatatgcagaactctcatttttctttcgatacagcctctggcacctttgaagatgtaaccggaacaaaagtcaagatcgttgaataccccagatcggtgaacaatggtgtttacgattcgtctactcatttggagatactgaacctacagggtgaaattgaaattttaaggtctttcaatgaataccaaattcgcgccgccaaacaacaactcggactggacatcgtgtacgaactacagggtaatgttcagacaacgtcaaagaatgattttgattcccgtggcaataatggtaacatgaccttcaattactacgcaaacacttatcagaattcagtagacttctcgacctcctcgtcggcgtcaggcgccggacctgggaactctcggggcggattagcgggtctcctcacaaatttcagtggaatcttgaaccctcttggctacctcaaagatcacaacaccgaagaaatggaaaactctgctgatcgagtcacaacgcaaacggcgggcaacactgccataaacacgcaatcatcattgggtgtgttgtgtgcctacgttgaagacccgaccaaatctgatcctccgtccagctctggcgatatcgagaccaatcccgggccgatgtacagcatgcagctcgcatcctgtgtcacattgacacttgtgctccttgtcaacagcgcacccacttcaagctccacttcaagctctacagcggaagcacagcagcagcagcagcagcagcagcagcagcagcagcacctggagcagctgttgatggacctacaggagctcctgagcaggatggagaattacaggaacctgaaactccccaggatgctcaccttcaaattttacttgcccaagcaggccacagaattgaaagatcttcagtgcctagaagatgaacttggacctctgcggcatgttctggatttgactcaaagcaaaagctttcaattggaagatgctgagaatttcatcagcaatatcagagtaactgttgtaaaactaaagggctctgacaacacatttgagtgccaattcgatgatgagtcagcaactgtggtggactttctgaggagatggatagccttctgtcaaagcatcatctcaacaagccctcaacaccaccatcatcaccacggctcaggctcaggcatatttttagaaacctcaggctcacctcagatcactctttggcaacgacccctcgtcacaataaagataggggggcaactaaaggaagctctattagatacaggagcagatgatacagtattagaagaaatgagtttgccaggaagatggaaaccaaaaatgatagggggaattggaggttttatcaaagtaagacagtatgatcagatactcatagaaatctgtggacataaagctataggtacagtattagtaggacctacacctgtcaacataattggaagaaatctgttgactcagattggttgcactttaaattttggctcaggctcaggcatatttttagaaacctcaggctcaatggctcagtcactggctctgagcctccttatcctggttctggcctttggcatccccaggacccaaggctcaatgtgtaaacctattactgggactattaatgatttgaatcagcaagtgtggacccttcagggtcagaaccttgtggcagttccacgaagtgacagtgtgaccccagtcactgttgctgttatcacatgcaagtatccagaggctcttgagcaaggcagaggggatcccatttatttgggaatccagaatccagaaatgtgtttgtattgtgagaaggttggagaacagcccacattgcagctaaaagagcagaagatcatggatctgtatggccaacccgagcccgtgaaacccttccttttctaccgtgccaagactggtaggacctccacccttgagtctgtggccttcccggactggttcattgcctcctccaagagagaccagcccatcattctgacttcagaacttgggaagtcatacaacactgcctttgaattaaatataaatgacgagggcagaggaagtctgctaacatgcggtgacgtcgaggagaatcccgggcctgcttctgacaacccaattttggagtttcttgaagcagaaaatgatctagtcactctggcctctctctggaagatggtgcactctgttcaacagacctggagaaagtatgtgaagaacgatgatttttggcccaatttactcagcgagctagtgggggaaggctctgtcgccttggccgccacgctatccaaccaagcttcagtaaaggctcttttgggcctgcactttctctctcgggggctcaattacactgacttttactctttactgatagagaaatgctctagtttctttaccgtagaaccacctcctccaccagctgaaaacctgatgaccaagccctcagtgaagtcgaaattccgaaaactgtttaagatgcaaggacccatggacaaagtcaaagactggaaccaaatagctgccggcttgaagaattttcaatttgttcgtgacctagtcaaagaggtggtcgattggctgcaggcctggatcaacaaagagaaagccagccctgtcctccagtaccagttggagatgaagaagctcgggcctgtggccttggctcatgacgctttcatggctggttccgggccccctcttagcgacgaccagattgaatacctccagaacctcaaatctcttgccctaacactggggaagactaatttggcccaaagtctcaccactatgatcaatgccaaacaaagttcagcccaacgagttgaacccgttgtggtggtccttagaggcaagccgggatgcggcaagagcttggcctctacgttgattgcccaggctgtgtccaagcgcctctatggctcccaaagtgtatattctcttcccccagatccagatttcttcgatggatacaaaggacagttcgtgaccttgatggatgatttgggacaaaacccggatggacaagatttctccaccttttgtcagatggtgtcgaccgcccaatttctccccaacatggcggaccttgcagagaaagggcgtccctttacctccaatctcatcattgcaactacaaatctcccccacttcagtcctgtcaccattgctgatccttctgcagtctctcgccgtatcaactacgatctgactctagaagtatctgaggcctacaagaaacacacacggctgaattttgacttggctttcaggcgcacagacgccccccccatttatccttttgctgcccatgtgccctttgtggacgtagctgtgcgcttcaaaaatggtcaccagaattttaatctcctagagttggtcgattccatttgtacagacattcgagccaagcaacaaggtgcccgaaacatgcagactctggttctacagagccccaacgagaatgatgacacccccgtcgacgaggcgttgggtagagttctctcccccgctgcggtcgatgaggcgcttgtcgacctcactccagaggccgacccggttggccgtttggctattcttgccaagctaggtcttgccctagctgcggtcacccctggtctgataatcttggcagtgggactctacaggtacttctctggctctgatgcagaccaagaagaaacagaaagtgagggatctgtcaaggcacccaggagcgaaaatgcttatgacggcccgaagaaaaactctaagccccctggagcactctctctcatggaaatgcaacagcccaacgtggacatgggctttgaggctgcggtcgctaagaaagtggtcgtccccattaccttcatggttcccaacagaccttctgggcttacacagtccgctcttctggtgaccggccggaccttcctaatcaatgaacatacatggtccaatccctcctggaccagcttcacaatccgcggtgaggtacacactcgtgatgagcccttccaaacggttcatttcactcaccacggtattcccacagatctgatgatggtacgtctcggaccgggcaattctttccctaacaatctagacaagtttggacttgaccagatgccggcacgcaactcccgtgtggttggcgtttcgtccagttacggaaacttcttcttctctggaaatttcctcggatttgttgattccatcacctctgaacaaggaacttacgcaagactctttaggtacagggtgacgacctacaaaggatggtgcggctcggccctggtctgtgaggccggtggcgtccgacgcatcattggcctgcattctgctggcgccgccggtatcggcgccgggacctatatctcaaaattaggactaatcaaagccctgaaacacctcggtgaacctttggccacaatgcaaggactgatgactgaattagagcctggaatcaccgtacatgtaccccggaaatccaaattgagaaagacgaccgcacacgcggtgtacaaaccggagtttgagcctgctgtgttgtcaaaatttgatcccagactgaacaaggatgttgacttggatgaagtaatttggtctaaacacactgccaatgtcccttaccaacctcctttgttctacacatacatgtcagagtacgctcatcgagtcttctccttcttggggaaagacaatgacattctgaccgtcaaagaagcaattctgggcatccccggactagaccccatggatccccacacagctccgggtctgccttacgccatcaacggccttcgacgtactgatctcgtcgattttgtgaacggtacagtagatgcggcgctggctgtacaaatccagaaattcttagacggtgactactctgaccatgtcttccaaacttttctgaaagatgagatcagaccctcagagaaagtccgagcgggaaaaacccgcattgttgatgtgccctccctggcgcattgcattgtgggcagaatgttgcttgggcgctttgctgccaagtttcaatcccatcctggctttctcctcggctctgctatcgggtctgaccctgatgttttctggaccgtcataggggctcaactcgaggggagaaagaacacgtatgacgtggactacagtgcctttgactcttcacacggcactggctccttcgaggctctcatctctcactttttcaccgtggacaatggttttagccctgcgctgggaccgtatctcagatccctggctgtctcggtgcacgcttacggcgagcgtcgcatcaagattaccggtggcctcccctccggttgtgccgcgaccagcctgctgaacacagtgctcaacaatgtgatcatcaggactgctctggcattgacttacaaggaatttgaatatgacatggttgatatcatcgcctacggtgacgaccttctggttggcacggattacgatctggacttcaatgaggtggcacgacgcgctgccaagttggggtataagatgactcctgccaacaagggttctgtcttccctccgacttcctctctttccgatgctgtttttctaaagcgcaaattcgtccaaaacaacgacggcttatacaaaccagttatggatttaaagaatttggaagccatgctctcctacttcaaaccaggaacactactcgagaagctgcaatctgtttctatgttggctcaacattctggaaaagaagaatatgatagattgatgcaccccttcgctgactacggtgccgtaccgagtcacgagtacctgcaggcaagatggagggccttgttcgactgacccagatagcccaaggcgcttcggtgctgccggcgattctgggagaactcagtcggaacagaaaagggaaaaaaaaaaaaaaaaaaaaaaaaaaaaaaggccggcatggtcccagcctcctcgctggcgccggctgggcaacatgcttcggcatggcgaatgggacgcggccgctcgagtctagagggcccgtttaaacccgctgatcagcctcgactgtgccttctagttgccagccatctgttgtttgcccctcccccgtgccttccttgaccctggaaggtgccactcccactgtcctttcctaataaaatgaggaaattgcatcgcattgtctgagtaggtgtcattctattctggggggtggggtggggcaggacagcaagggggaggattgggaagacaatagcaggcatgctggggatgcggtgggctctatgggttggcattataagaaagcattgcttatcaatttgttgcaacgaacaggtcactatcagtcaaaataaaatcattatttgccatccagctgcagctctggcccgtgtctcaaaatctctgatgttacattgcacaagataaaaatatatcatcatgaacaataaaactgtctgcttacataaacagtaatacaaggggtgttatgagccatattcaacgggaaacgtcgaggccgcgattaaattccaacatggatgctgatttatatgggtataaatgggctcgcgataatgtcgggcaatcaggtgcgacaatctatcgcttgtatgggaagcccgatgcgccagagttgtttctgaaacatggcaaaggtagcgttgccaatgatgttacagatgagatggtcagactaaactggctgacggaatttatgcctcttccgaccatcaagcattttatccgtactcctgatgatgcatggttactcaccactgcgatccccggaaaaacagcattccaggtattagaagaatatcctgattcaggtgaaaatattgttgatgcgctggcagtgtccctgcgccggttgcattcgattcctgtttgtaattgtccttttaacagcgatcgcgtatttcgtctcgctcaggcgcaatcacgaatgaataacggtttggttgatgcgagtgattttgatgacgagcgtaatggctggcctgttgaacaagtctggaaagaaatgcataaacttttgccattctcaccggattcagtcgtcactcatggtgatttctcacttgataaccttatttttgacgaggggaaattaataggttgtattgatgttggacgagtcggaatcgcagaccgataccaggatcttgccatcctatggaactgcctcggtgagttttctccttcattacagaaacggctttttcaaaaatatggtattgataatcctgatatgaataaattgcagtttcatttgatgctcgatgagtttttctaatcagaattggttaattggttgtaacattattcagattgggccccgttccactgagcgtcagaccccgtagaaaagatcaaaggatcttcttgagatcctttttttctgcgcgtaatctgctgcttgcaaacaaaaaaaccaccgctaccagcggtggtttgtttgccggatcaagagctaccaactctttttccgaaggtaactggcttcagcagagcgcagataccaaatactgttcttctagtgtagccgtagttaggccaccacttcaagaactctgtagcaccgcctacatacctcgctctgctaatcctgttaccagtggctgctgccagtggcgataagtcgtgtcttaccgggttggactcaagacgatagttaccggataaggcgcagcggtcgggctgaacggggggttcgtgcacacagcccagcttggagcgaacgacctacaccgaactgagatacctacagcgtgagctatgagaaagcgccacgcttcccgaagggagaaaggcggacaggtatccggtaagcggcagggtcggaacaggagagcgcacgagggagcttccagggggaaacgcctggtatctttatagtcctgtcgggtttcgccacctctgacttgagcgtcgatttttgtgatgctcgtcaggggggcggagcctatggaaaaacgccagcaacgcggcctttttacggttcctggccttttgctggccttttgctcacatgttctttcctgcgttatcccctgattctgtggataaccgtattaccgctagcatggatctcggggacgtctaactactaagcgagagtagggaactgccaggcatcaaataaaacgaaaggctcagtcggaagactgggcctttcgttttatctgttgtttgtcggtgaacgctctcctgagtaggacaaatccgccgggagcggatttgaacgttgtgaagcaacggcccggagggtggcgggcaggacgcccgccataaactgccaggcatcaaactaagcagaaggccatc

SEQ ID NO: 56 - RNA, 6572 nt, Artificial Sequence
  Viper-SVVTrunc10-IL-2 1xHIVPR IL-36g RNA
uuugaaauggggggcugggcccugaugcccaguccuuccuuuccccuuccgggggguuaaccggcuguguuugcuagaggcacagaggggcaacauccaaccugcuuuugcggggaacggugcggcuccgauuccugcgucgccaaagguguuagcgcacccaaacggcgcaccuaccaauguuauugguguggucugcgaguucuagccuacucguuucucccccgaccauucacucacccacgaaaaguguguuguaaccauaagauuuaacccccgcacgggaugugcgauaaccguaagacuggcucaagcgcggaaagcgcuguaaccacaugcuguuagucccuuuauggcugcaagauggcuacccaccucggaucacugaacuggagcucgacccuccuuaguaagggaaccgagaggccuucgugcaacaagcuccgacacagaguccacgugacugcuaccaccaugaguacaugguucuccccucucgacccaggacuucuuuuugaauauccacggcucgauccagaggguggggcaugaccccuagcauagcgagcuacagcgggaacuguagcuaggccuuagcgugccuuggauacugccugauagggcgacggccuagucgugucgguucuauagguagcacauacaaauaugcagaacucucauuuuucuuucgauacagccucuggcaccuuugaagauguaaccggaacaaaagucaagaucguugaauaccccagaucggugaacaaugguguuuacgauucgucuacucauuuggagauacugaaccuacagggugaaauugaaauuuuaaggucuuucaaugaauaccaaauucgcgccgccaaacaacaacucggacuggacaucguguacgaacuacaggguaauguucagacaacgucaaagaaugauuuugauucccguggcaauaaugguaacaugaccuucaauuacuacgcaaacacuuaucagaauucaguagacuucucgaccuccucgucggcgucaggcgccggaccugggaacucucggggcggauuagcgggucuccucacaaauuucaguggaaucuugaacccucuuggcuaccucaaagaucacaacaccgaagaaauggaaaacucugcugaucgagucacaacgcaaacggcgggcaacacugccauaaacacgcaaucaucauuggguguguugugugccuacguugaagacccgaccaaaucugauccuccguccagcucuggcgauaucgagaccaaucccgggccgauguacagcaugcagcucgcauccugugucacauugacacuugugcuccuugucaacagcgcacccacuucaagcuccacuucaagcucuacagcggaagcacagcagcagcagcagcagcagcagcagcagcagcagcaccuggagcagcuguugauggaccuacaggagcuccugagcaggauggagaauuacaggaaccugaaacuccccaggaugcucaccuucaaauuuuacuugcccaagcaggccacagaauugaaagaucuucagugccuagaagaugaacuuggaccucugcggcauguucuggauuugacucaaagcaaaagcuuucaauuggaagaugcugagaauuucaucagcaauaucagaguaacuguuguaaaacuaaagggcucugacaacacauuugagugccaauucgaugaugagucagcaacugugguggacuuucugaggagauggauagccuucugucaaagcaucaucucaacaagcccucaacaccaccaucaucaccacggcucaggcucaggcauauuuuuagaaaccucaggcucaccucagaucacucuuuggcaacgaccccucgucacaauaaagauaggggggcaacuaaaggaagcucuauuagauacaggagcagaugauacaguauuagaagaaaugaguuugccaggaagauggaaaccaaaaaugauagggggaauuggagguuuuaucaaaguaagacaguaugaucagauacucauagaaaucuguggacauaaagcuauagguacaguauuaguaggaccuacaccugucaacauaauuggaagaaaucuguugacucagauugguugcacuuuaaauuuuggcucaggcucaggcauauuuuuagaaaccucaggcucaauggcucagucacuggcucugagccuccuuauccugguucuggccuuuggcauccccaggacccaaggcucaauguguaaaccuauuacugggacuauuaaugauuugaaucagcaaguguggacccuucagggucagaaccuuguggcaguuccacgaagugacagugugaccccagucacuguugcuguuaucacaugcaaguauccagaggcucuugagcaaggcagaggggaucccauuuauuugggaauccagaauccagaaauguguuuguauugugagaagguuggagaacagcccacauugcagcuaaaagagcagaagaucauggaucuguauggccaacccgagcccgugaaacccuuccuuuucuaccgugccaagacugguaggaccuccacccuugagucuguggccuucccggacugguucauugccuccuccaagagagaccagcccaucauucugacuucagaacuugggaagucauacaacacugccuuugaauuaaauauaaaugacgagggcagaggaagucugcuaacaugcggugacgucgaggagaaucccgggccugcuucugacaacccaauuuuggaguuucuugaagcagaaaaugaucuagucacucuggccucucucuggaagauggugcacucuguucaacagaccuggagaaaguaugugaagaacgaugauuuuuggcccaauuuacucagcgagcuagugggggaaggcucugucgccuuggccgccacgcuauccaaccaagcuucaguaaaggcucuuuugggccugcacuuucucucucgggggcucaauuacacugacuuuuacucuuuacugauagagaaaugcucuaguuucuuuaccguagaaccaccuccuccaccagcugaaaaccugaugaccaagcccucagugaagucgaaauuccgaaaacuguuuaagaugcaaggacccauggacaaagucaaagacuggaaccaaauagcugccggcuugaagaauuuucaauuuguucgugaccuagucaaagagguggucgauuggcugcaggccuggaucaacaaagagaaagccagcccuguccuccaguaccaguuggagaugaagaagcucgggccuguggccuuggcucaugacgcuuucauggcugguuccgggcccccucuuagcgacgaccagauugaauaccuccagaaccucaaaucucuugcccuaacacuggggaagacuaauuuggcccaaagucucaccacuaugaucaaugccaaacaaaguucagcccaacgaguugaacccguuguggugguccuuagaggcaagccgggaugcggcaagagcuuggccucuacguugauugcccaggcuguguccaagcgccucuauggcucccaaaguguauauucucuucccccagauccagauuucuucgauggauacaaaggacaguucgugaccuugauggaugauuugggacaaaacccggauggacaagauuucuccaccuuuugucagauggugucgaccgcccaauuucuccccaacauggcggaccuugcagagaaagggcgucccuuuaccuccaaucucaucauugcaacuacaaaucucccccacuucaguccugucaccauugcugauccuucugcagucucucgccguaucaacuacgaucugacucuagaaguaucugaggccuacaagaaacacacacggcugaauuuugacuuggcuuucaggcgcacagacgccccccccauuuauccuuuugcugcccaugugcccuuuguggacguagcugugcgcuucaaaaauggucaccagaauuuuaaucuccuagaguuggucgauuccauuuguacagacauucgagccaagcaacaaggugcccgaaacaugcagacucugguucuacagagccccaacgagaaugaugacacccccgucgacgaggcguuggguagaguucucucccccgcugcggucgaugaggcgcuugucgaccucacuccagaggccgacccgguuggccguuuggcuauucuugccaagcuaggucuugcccuagcugcggucaccccuggucugauaaucuuggcagugggacucuacagguacuucucuggcucugaugcagaccaagaagaaacagaaagugagggaucugucaaggcacccaggagcgaaaaugcuuaugacggcccgaagaaaaacucuaagcccccuggagcacucucucucauggaaaugcaacagcccaacguggacaugggcuuugaggcugcggucgcuaagaaaguggucguccccauuaccuucaugguucccaacagaccuucugggcuuacacaguccgcucuucuggugaccggccggaccuuccuaaucaaugaacauacaugguccaaucccuccuggaccagcuucacaauccgcggugagguacacacucgugaugagcccuuccaaacgguucauuucacucaccacgguauucccacagaucugaugaugguacgucucggaccgggcaauucuuucccuaacaaucuagacaaguuuggacuugaccagaugccggcacgcaacucccgugugguuggcguuucguccaguuacggaaacuucuucuucucuggaaauuuccucggauuuguugauuccaucaccucugaacaaggaacuuacgcaagacucuuuagguacagggugacgaccuacaaaggauggugcggcucggcccuggucugugaggccgguggcguccgacgcaucauuggccugcauucugcuggcgccgccgguaucggcgccgggaccuauaucucaaaauuaggacuaaucaaagcccugaaacaccucggugaaccuuuggccacaaugcaaggacugaugacugaauuagagccuggaaucaccguacauguaccccggaaauccaaauugagaaagacgaccgcacacgcgguguacaaaccggaguuugagccugcuguguugucaaaauuugaucccagacugaacaaggauguugacuuggaugaaguaauuuggucuaaacacacugccaaugucccuuaccaaccuccuuuguucuacacauacaugucagaguacgcucaucgagucuucuccuucuuggggaaagacaaugacauucugaccgucaaagaagcaauucugggcauccccggacuagaccccauggauccccacacagcuccgggucugccuuacgccaucaacggccuucgacguacugaucucgucgauuuugugaacgguacaguagaugcggcgcuggcuguacaaauccagaaauucuuagacggugacuacucugaccaugucuuccaaacuuuucugaaagaugagaucagacccucagagaaaguccgagcgggaaaaacccgcauuguugaugugcccucccuggcgcauugcauugugggcagaauguugcuugggcgcuuugcugccaaguuucaaucccauccuggcuuucuccucggcucugcuaucgggucugacccugauguuuucuggaccgucauaggggcucaacucgaggggagaaagaacacguaugacguggacuacagugccuuugacucuucacacggcacuggcuccuucgaggcucucaucucucacuuuuucaccguggacaaugguuuuagcccugcgcugggaccguaucucagaucccuggcugucucggugcacgcuuacggcgagcgucgcaucaagauuaccgguggccuccccuccgguugugccgcgaccagccugcugaacacagugcucaacaaugugaucaucaggacugcucuggcauugacuuacaaggaauuugaauaugacaugguugauaucaucgccuacggugacgaccuucugguuggcacggauuacgaucuggacuucaaugagguggcacgacgcgcugccaaguugggguauaagaugacuccugccaacaaggguucugucuucccuccgacuuccucucuuuccgaugcuguuuuucuaaagcgcaaauucguccaaaacaacgacggcuuauacaaaccaguuauggauuuaaagaauuuggaagccaugcucuccuacuucaaaccaggaacacuacucgagaagcugcaaucuguuucuauguuggcucaacauucuggaaaagaagaauaugauagauugaugcaccccuucgcugacuacggugccguaccgagucacgaguaccugcaggcaagauggagggccuuguucgacugacccagauagcccaaggcgcuucggugcugccggcgauucugggagaacucagucggaacagaaaagggaaaaaaaaaaaaaaaaaaaaaaaaaaaaaa

SEQ ID NO: 57 - DNA, 10149 bp, Artificial Sequence
  Viper-SVVTrunc10-IL-2 2xHIVPR IL-36g
ctgacggatggcctttttgcgtttctacaaactcttcctgttagttagttacttaagctcgggccccaaataatgattttattttgactgatagtgacctgttcgttgcaacaaattgataagcaatgcttttttataatgccaacattgattattgactagttattaatagtaatcaattacggggtcattagttcatagcccatatatggagttccgcgttacataacttacggtaaatggcccgcctggctgaccgcccaacgacccccgcccattgacgtcaataatgacgtatgttcccatagtaacgccaatagggactttccattgacgtcaatgggtggagtatttacggtaaactgcccacttggcagtacatcaagtgtatcatatgccaagtacgccccctattgacgtcaatgacggtaaatggcccgcctggcattatgcccagtacatgaccttatgggactttcctacttggcagtacatctacgtattagtcatcgctattaccatggtgatgcggttttggcagtacatcaatgggcgtggatagcggtttgactcacggggatttccaagtctccaccccattgacgtcaatgggagtttgttttggcaccaaaatcaacgggactttccaaaatgtcgtaacaactccgccccattgacgcaaatgggcggtaggcgtgtacggtgggaggtctatataagcagagctctctggctaactagagaacccactgcttactggcttatcgaaattaatacgactcactatagggagacccaagctggctagcgtttaaacttaagcttggtaccttatcaaactgatgagtccgtgaggacgaaacgagtaagctcgtctttgaaatggggggctgggccctgatgcccagtccttcctttccccttccggggggttaaccggctgtgtttgctagaggcacagaggggcaacatccaacctgcttttgcggggaacggtgcggctccgattcctgcgtcgccaaaggtgttagcgcacccaaacggcgcacctaccaatgttattggtgtggtctgcgagttctagcctactcgtttctcccccgaccattcactcacccacgaaaagtgtgttgtaaccataagatttaacccccgcacgggatgtgcgataaccgtaagactggctcaagcgcggaaagcgctgtaaccacatgctgttagtccctttatggctgcaagatggctacccacctcggatcactgaactggagctcgaccctccttagtaagggaaccgagaggccttcgtgcaacaagctccgacacagagtccacgtgactgctaccaccatgagtacatggttctcccctctcgacccaggacttctttttgaatatccacggctcgatccagagggtggggcatgacccctagcatagcgagctacagcgggaactgtagctaggccttagcgtgccttggatactgcctgatagggcgacggcctagtcgtgtcggttctataggtagcacatacaaatatgcagaactctcatttttctttcgatacagcctctggcacctttgaagatgtaaccggaacaaaagtcaagatcgttgaataccccagatcggtgaacaatggtgtttacgattcgtctactcatttggagatactgaacctacagggtgaaattgaaattttaaggtctttcaatgaataccaaattcgcgccgccaaacaacaactcggactggacatcgtgtacgaactacagggtaatgttcagacaacgtcaaagaatgattttgattcccgtggcaataatggtaacatgaccttcaattactacgcaaacacttatcagaattcagtagacttctcgacctcctcgtcggcgtcaggcgccggacctgggaactctcggggcggattagcgggtctcctcacaaatttcagtggaatcttgaaccctcttggctacctcaaagatcacaacaccgaagaaatggaaaactctgctgatcgagtcacaacgcaaacggcgggcaacactgccataaacacgcaatcatcattgggtgtgttgtgtgcctacgttgaagacccgaccaaatctgatcctccgtccagctctggcgatatcgagaccaatcccgggccgatgtacagcatgcagctcgcatcctgtgtcacattgacacttgtgctccttgtcaacagcgcacccacttcaagctccacttcaagctctacagcggaagcacagcagcagcagcagcagcagcagcagcagcagcagcacctggagcagctgttgatggacctacaggagctcctgagcaggatggagaattacaggaacctgaaactccccaggatgctcaccttcaaattttacttgcccaagcaggccacagaattgaaagatcttcagtgcctagaagatgaacttggacctctgcggcatgttctggatttgactcaaagcaaaagctttcaattggaagatgctgagaatttcatcagcaatatcagagtaactgttgtaaaactaaagggctctgacaacacatttgagtgccaattcgatgatgagtcagcaactgtggtggactttctgaggagatggatagccttctgtcaaagcatcatctcaacaagccctcaacaccaccatcatcaccacggctcaggctcaggcatatttttagaaacctcaggctcacctcagatcactctttggcaacgacccctcgtcacaataaagataggggggcaactaaaggaagctctattagatacaggagcagatgatacagtattagaagaaatgagtttgccaggaagatggaaaccaaaaatgatagggggaattggaggttttatcaaagtaagacagtatgatcagatactcatagaaatctgtggacataaagctataggtacagtattagtaggacctacacctgtcaacataattggaagaaatctgttgactcagattggttgcactttaaattttggctcaggctcaggctcaggctcacctcagatcactctttggcaacgacccctcgtcacaataaagataggggggcaactaaaggaagctctattagatacaggagcagatgatacagtattagaagaaatgagtttgccaggaagatggaaaccaaaaatgatagggggaattggaggttttatcaaagtaagacagtatgatcagatactcatagaaatctgtggacataaagctataggtacagtattagtaggacctacacctgtcaacataattggaagaaatctgttgactcagattggttgcactttaaattttggctcaggcatatttttagaaacctcaggctcaatggctcagtcactggctctgagcctccttatcctggttctggcctttggcatccccaggacccaaggctcaatgtgtaaacctattactgggactattaatgatttgaatcagcaagtgtggacccttcagggtcagaaccttgtggcagttccacgaagtgacagtgtgaccccagtcactgttgctgttatcacatgcaagtatccagaggctcttgagcaaggcagaggggatcccatttatttgggaatccagaatccagaaatgtgtttgtattgtgagaaggttggagaacagcccacattgcagctaaaagagcagaagatcatggatctgtatggccaacccgagcccgtgaaacccttccttttctaccgtgccaagactggtaggacctccacccttgagtctgtggccttcccggactggttcattgcctcctccaagagagaccagcccatcattctgacttcagaacttgggaagtcatacaacactgcctttgaattaaatataaatgacgagggcagaggaagtctgctaacatgcggtgacgtcgaggagaatcccgggcctgcttctgacaacccaattttggagtttcttgaagcagaaaatgatctagtcactctggcctctctctggaagatggtgcactctgttcaacagacctggagaaagtatgtgaagaacgatgatttttggcccaatttactcagcgagctagtgggggaaggctctgtcgccttggccgccacgctatccaaccaagcttcagtaaaggctcttttgggcctgcactttctctctcgggggctcaattacactgacttttactctttactgatagagaaatgctctagtttctttaccgtagaaccacctcctccaccagctgaaaacctgatgaccaagccctcagtgaagtcgaaattccgaaaactgtttaagatgcaaggacccatggacaaagtcaaagactggaaccaaatagctgccggcttgaagaattttcaatttgttcgtgacctagtcaaagaggtggtcgattggctgcaggcctggatcaacaaagagaaagccagccctgtcctccagtaccagttggagatgaagaagctcgggcctgtggccttggctcatgacgctttcatggctggttccgggccccctcttagcgacgaccagattgaatacctccagaacctcaaatctcttgccctaacactggggaagactaatttggcccaaagtctcaccactatgatcaatgccaaacaaagttcagcccaacgagttgaacccgttgtggtggtccttagaggcaagccgggatgcggcaagagcttggcctctacgttgattgcccaggctgtgtccaagcgcctctatggctcccaaagtgtatattctcttcccccagatccagatttcttcgatggatacaaaggacagttcgtgaccttgatggatgatttgggacaaaacccggatggacaagatttctccaccttttgtcagatggtgtcgaccgcccaatttctccccaacatggcggaccttgcagagaaagggcgtccctttacctccaatctcatcattgcaactacaaatctcccccacttcagtcctgtcaccattgctgatccttctgcagtctctcgccgtatcaactacgatctgactctagaagtatctgaggcctacaagaaacacacacggctgaattttgacttggctttcaggcgcacagacgccccccccatttatccttttgctgcccatgtgccctttgtggacgtagctgtgcgcttcaaaaatggtcaccagaattttaatctcctagagttggtcgattccatttgtacagacattcgagccaagcaacaaggtgcccgaaacatgcagactctggttctacagagccccaacgagaatgatgacacccccgtcgacgaggcgttgggtagagttctctcccccgctgcggtcgatgaggcgcttgtcgacctcactccagaggccgacccggttggccgtttggctattcttgccaagctaggtcttgccctagctgcggtcacccctggtctgataatcttggcagtgggactctacaggtacttctctggctctgatgcagaccaagaagaaacagaaagtgagggatctgtcaaggcacccaggagcgaaaatgcttatgacggcccgaagaaaaactctaagccccctggagcactctctctcatggaaatgcaacagcccaacgtggacatgggctttgaggctgcggtcgctaagaaagtggtcgtccccattaccttcatggttcccaacagaccttctgggcttacacagtccgctcttctggtgaccggccggaccttcctaatcaatgaacatacatggtccaatccctcctggaccagcttcacaatccgcggtgaggtacacactcgtgatgagcccttccaaacggttcatttcactcaccacggtattcccacagatctgatgatggtacgtctcggaccgggcaattctttccctaacaatctagacaagtttggacttgaccagatgccggcacgcaactcccgtgtggttggcgtttcgtccagttacggaaacttcttcttctctggaaatttcctcggatttgttgattccatcacctctgaacaaggaacttacgcaagactctttaggtacagggtgacgacctacaaaggatggtgcggctcggccctggtctgtgaggccggtggcgtccgacgcatcattggcctgcattctgctggcgccgccggtatcggcgccgggacctatatctcaaaattaggactaatcaaagccctgaaacacctcggtgaacctttggccacaatgcaaggactgatgactgaattagagcctggaatcaccgtacatgtaccccggaaatccaaattgagaaagacgaccgcacacgcggtgtacaaaccggagtttgagcctgctgtgttgtcaaaatttgatcccagactgaacaaggatgttgacttggatgaagtaatttggtctaaacacactgccaatgtcccttaccaacctcctttgttctacacatacatgtcagagtacgctcatcgagtcttctccttcttggggaaagacaatgacattctgaccgtcaaagaagcaattctgggcatccccggactagaccccatggatccccacacagctccgggtctgccttacgccatcaacggccttcgacgtactgatctcgtcgattttgtgaacggtacagtagatgcggcgctggctgtacaaatccagaaattcttagacggtgactactctgaccatgtcttccaaacttttctgaaagatgagatcagaccctcagagaaagtccgagcgggaaaaacccgcattgttgatgtgccctccctggcgcattgcattgtgggcagaatgttgcttgggcgctttgctgccaagtttcaatcccatcctggctttctcctcggctctgctatcgggtctgaccctgatgttttctggaccgtcataggggctcaactcgaggggagaaagaacacgtatgacgtggactacagtgcctttgactcttcacacggcactggctccttcgaggctctcatctctcactttttcaccgtggacaatggttttagccctgcgctgggaccgtatctcagatccctggctgtctcggtgcacgcttacggcgagcgtcgcatcaagattaccggtggcctcccctccggttgtgccgcgaccagcctgctgaacacagtgctcaacaatgtgatcatcaggactgctctggcattgacttacaaggaatttgaatatgacatggttgatatcatcgcctacggtgacgaccttctggttggcacggattacgatctggacttcaatgaggtggcacgacgcgctgccaagttggggtataagatgactcctgccaacaagggttctgtcttccctccgacttcctctctttccgatgctgtttttctaaagcgcaaattcgtccaaaacaacgacggcttatacaaaccagttatggatttaaagaatttggaagccatgctctcctacttcaaaccaggaacactactcgagaagctgcaatctgtttctatgttggctcaacattctggaaaagaagaatatgatagattgatgcaccccttcgctgactacggtgccgtaccgagtcacgagtacctgcaggcaagatggagggccttgttcgactgacccagatagcccaaggcgcttcggtgctgccggcgattctgggagaactcagtcggaacagaaaagggaaaaaaaaaaaaaaaaaaaaaaaaaaaaaaggccggcatggtcccagcctcctcgctggcgccggctgggcaacatgcttcggcatggcgaatgggacgcggccgctcgagtctagagggcccgtttaaacccgctgatcagcctcgactgtgccttctagttgccagccatctgttgtttgcccctcccccgtgccttccttgaccctggaaggtgccactcccactgtcctttcctaataaaatgaggaaattgcatcgcattgtctgagtaggtgtcattctattctggggggtggggtggggcaggacagcaagggggaggattgggaagacaatagcaggcatgctggggatgcggtgggctctatgggttggcattataagaaagcattgcttatcaatttgttgcaacgaacaggtcactatcagtcaaaataaaatcattatttgccatccagctgcagctctggcccgtgtctcaaaatctctgatgttacattgcacaagataaaaatatatcatcatgaacaataaaactgtctgcttacataaacagtaatacaaggggtgttatgagccatattcaacgggaaacgtcgaggccgcgattaaattccaacatggatgctgatttatatgggtataaatgggctcgcgataatgtcgggcaatcaggtgcgacaatctatcgcttgtatgggaagcccgatgcgccagagttgtttctgaaacatggcaaaggtagcgttgccaatgatgttacagatgagatggtcagactaaactggctgacggaatttatgcctcttccgaccatcaagcattttatccgtactcctgatgatgcatggttactcaccactgcgatccccggaaaaacagcattccaggtattagaagaatatcctgattcaggtgaaaatattgttgatgcgctggcagtgtccctgcgccggttgcattcgattcctgtttgtaattgtccttttaacagcgatcgcgtatttcgtctcgctcaggcgcaatcacgaatgaataacggtttggttgatgcgagtgattttgatgacgagcgtaatggctggcctgttgaacaagtctggaaagaaatgcataaacttttgccattctcaccggattcagtcgtcactcatggtgatttctcacttgataaccttatttttgacgaggggaaattaataggttgtattgatgttggacgagtcggaatcgcagaccgataccaggatcttgccatcctatggaactgcctcggtgagttttctccttcattacagaaacggctttttcaaaaatatggtattgataatcctgatatgaataaattgcagtttcatttgatgctcgatgagtttttctaatcagaattggttaattggttgtaacattattcagattgggccccgttccactgagcgtcagaccccgtagaaaagatcaaaggatcttcttgagatcctttttttctgcgcgtaatctgctgcttgcaaacaaaaaaaccaccgctaccagcggtggtttgtttgccggatcaagagctaccaactctttttccgaaggtaactggcttcagcagagcgcagataccaaatactgttcttctagtgtagccgtagttaggccaccacttcaagaactctgtagcaccgcctacatacctcgctctgctaatcctgttaccagtggctgctgccagtggcgataagtcgtgtcttaccgggttggactcaagacgatagttaccggataaggcgcagcggtcgggctgaacggggggttcgtgcacacagcccagcttggagcgaacgacctacaccgaactgagatacctacagcgtgagctatgagaaagcgccacgcttcccgaagggagaaaggcggacaggtatccggtaagcggcagggtcggaacaggagagcgcacgagggagcttccagggggaaacgcctggtatctttatagtcctgtcgggtttcgccacctctgacttgagcgtcgatttttgtgatgctcgtcaggggggcggagcctatggaaaaacgccagcaacgcggcctttttacggttcctggccttttgctggccttttgctcacatgttctttcctgcgttatcccctgattctgtggataaccgtattaccgctagcatggatctcggggacgtctaactactaagcgagagtagggaactgccaggcatcaaataaaacgaaaggctcagtcggaagactgggcctttcgttttatctgttgtttgtcggtgaacgctctcctgagtaggacaaatccgccgggagcggatttgaacgttgtgaagcaacggcccggagggtggcgggcaggacgcccgccataaactgccaggcatcaaactaagcagaaggccatc

SEQ ID NO: 58 - RNA, 6887 nt, Artificial Sequence
  Viper-SVVTrunc10-IL-2 2xHIVPR IL-36g RNA
uuugaaauggggggcugggcccugaugcccaguccuuccuuuccccuuccgggggguuaaccggcuguguuugcuagaggcacagaggggcaacauccaaccugcuuuugcggggaacggugcggcuccgauuccugcgucgccaaagguguuagcgcacccaaacggcgcaccuaccaauguuauugguguggucugcgaguucuagccuacucguuucucccccgaccauucacucacccacgaaaaguguguuguaaccauaagauuuaacccccgcacgggaugugcgauaaccguaagacuggcucaagcgcggaaagcgcuguaaccacaugcuguuagucccuuuauggcugcaagauggcuacccaccucggaucacugaacuggagcucgacccuccuuaguaagggaaccgagaggccuucgugcaacaagcuccgacacagaguccacgugacugcuaccaccaugaguacaugguucuccccucucgacccaggacuucuuuuugaauauccacggcucgauccagaggguggggcaugaccccuagcauagcgagcuacagcgggaacuguagcuaggccuuagcgugccuuggauacugccugauagggcgacggccuagucgugucgguucuauagguagcacauacaaauaugcagaacucucauuuuucuuucgauacagccucuggcaccuuugaagauguaaccggaacaaaagucaagaucguugaauaccccagaucggugaacaaugguguuuacgauucgucuacucauuuggagauacugaaccuacagggugaaauugaaauuuuaaggucuuucaaugaauaccaaauucgcgccgccaaacaacaacucggacuggacaucguguacgaacuacaggguaauguucagacaacgucaaagaaugauuuugauucccguggcaauaaugguaacaugaccuucaauuacuacgcaaacacuuaucagaauucaguagacuucucgaccuccucgucggcgucaggcgccggaccugggaacucucggggcggauuagcgggucuccucacaaauuucaguggaaucuugaacccucuuggcuaccucaaagaucacaacaccgaagaaauggaaaacucugcugaucgagucacaacgcaaacggcgggcaacacugccauaaacacgcaaucaucauuggguguguugugugccuacguugaagacccgaccaaaucugauccuccguccagcucuggcgauaucgagaccaaucccgggccgauguacagcaugcagcucgcauccugugucacauugacacuugugcuccuugucaacagcgcacccacuucaagcuccacuucaagcucuacagcggaagcacagcagcagcagcagcagcagcagcagcagcagcagcaccuggagcagcuguugauggaccuacaggagcuccugagcaggauggagaauuacaggaaccugaaacuccccaggaugcucaccuucaaauuuuacuugcccaagcaggccacagaauugaaagaucuucagugccuagaagaugaacuuggaccucugcggcauguucuggauuugacucaaagcaaaagcuuucaauuggaagaugcugagaauuucaucagcaauaucagaguaacuguuguaaaacuaaagggcucugacaacacauuugagugccaauucgaugaugagucagcaacugugguggacuuucugaggagauggauagccuucugucaaagcaucaucucaacaagcccucaacaccaccaucaucaccacggcucaggcucaggcauauuuuuagaaaccucaggcucaccucagaucacucuuuggcaacgaccccucgucacaauaaagauaggggggcaacuaaaggaagcucuauuagauacaggagcagaugauacaguauuagaagaaaugaguuugccaggaagauggaaaccaaaaaugauagggggaauuggagguuuuaucaaaguaagacaguaugaucagauacucauagaaaucuguggacauaaagcuauagguacaguauuaguaggaccuacaccugucaacauaauuggaagaaaucuguugacucagauugguugcacuuuaaauuuuggcucaggcucaggcucaggcucaccucagaucacucuuuggcaacgaccccucgucacaauaaagauaggggggcaacuaaaggaagcucuauuagauacaggagcagaugauacaguauuagaagaaaugaguuugccaggaagauggaaaccaaaaaugauagggggaauuggagguuuuaucaaaguaagacaguaugaucagauacucauagaaaucuguggacauaaagcuauagguacaguauuaguaggaccuacaccugucaacauaauuggaagaaaucuguugacucagauugguugcacuuuaaauuuuggcucaggcauauuuuuagaaaccucaggcucaauggcucagucacuggcucugagccuccuuauccugguucuggccuuuggcauccccaggacccaaggcucaauguguaaaccuauuacugggacuauuaaugauuugaaucagcaaguguggacccuucagggucagaaccuuguggcaguuccacgaagugacagugugaccccagucacuguugcuguuaucacaugcaaguauccagaggcucuugagcaaggcagaggggaucccauuuauuugggaauccagaauccagaaauguguuuguauugugagaagguuggagaacagcccacauugcagcuaaaagagcagaagaucauggaucuguauggccaacccgagcccgugaaacccuuccuuuucuaccgugccaagacugguaggaccuccacccuugagucuguggccuucccggacugguucauugccuccuccaagagagaccagcccaucauucugacuucagaacuugggaagucauacaacacugccuuugaauuaaauauaaaugacgagggcagaggaagucugcuaacaugcggugacgucgaggagaaucccgggccugcuucugacaacccaauuuuggaguuucuugaagcagaaaaugaucuagucacucuggccucucucuggaagauggugcacucuguucaacagaccuggagaaaguaugugaagaacgaugauuuuuggcccaauuuacucagcgagcuagugggggaaggcucugucgccuuggccgccacgcuauccaaccaagcuucaguaaaggcucuuuugggccugcacuuucucucucgggggcucaauuacacugacuuuuacucuuuacugauagagaaaugcucuaguuucuuuaccguagaaccaccuccuccaccagcugaaaaccugaugaccaagcccucagugaagucgaaauuccgaaaacuguuuaagaugcaaggacccauggacaaagucaaagacuggaaccaaauagcugccggcuugaagaauuuucaauuuguucgugaccuagucaaagagguggucgauuggcugcaggccuggaucaacaaagagaaagccagcccuguccuccaguaccaguuggagaugaagaagcucgggccuguggccuuggcucaugacgcuuucauggcugguuccgggcccccucuuagcgacgaccagauugaauaccuccagaaccucaaaucucuugcccuaacacuggggaagacuaauuuggcccaaagucucaccacuaugaucaaugccaaacaaaguucagcccaacgaguugaacccguuguggugguccuuagaggcaagccgggaugcggcaagagcuuggccucuacguugauugcccaggcuguguccaagcgccucuauggcucccaaaguguauauucucuucccccagauccagauuucuucgauggauacaaaggacaguucgugaccuugauggaugauuugggacaaaacccggauggacaagauuucuccaccuuuugucagauggugucgaccgcccaauuucuccccaacauggcggaccuugcagagaaagggcgucccuuuaccuccaaucucaucauugcaacuacaaaucucccccacuucaguccugucaccauugcugauccuucugcagucucucgccguaucaacuacgaucugacucuagaaguaucugaggccuacaagaaacacacacggcugaauuuugacuuggcuuucaggcgcacagacgccccccccauuuauccuuuugcugcccaugugcccuuuguggacguagcugugcgcuucaaaaauggucaccagaauuuuaaucuccuagaguuggucgauuccauuuguacagacauucgagccaagcaacaaggugcccgaaacaugcagacucugguucuacagagccccaacgagaaugaugacacccccgucgacgaggcguuggguagaguucucucccccgcugcggucgaugaggcgcuugucgaccucacuccagaggccgacccgguuggccguuuggcuauucuugccaagcuaggucuugcccuagcugcggucaccccuggucugauaaucuuggcagugggacucuacagguacuucucuggcucugaugcagaccaagaagaaacagaaagugagggaucugucaaggcacccaggagcgaaaaugcuuaugacggcccgaagaaaaacucuaagcccccuggagcacucucucucauggaaaugcaacagcccaacguggacaugggcuuugaggcugcggucgcuaagaaaguggucguccccauuaccuucaugguucccaacagaccuucugggcuuacacaguccgcucuucuggugaccggccggaccuuccuaaucaaugaacauacaugguccaaucccuccuggaccagcuucacaauccgcggugagguacacacucgugaugagcccuuccaaacgguucauuucacucaccacgguauucccacagaucugaugaugguacgucucggaccgggcaauucuuucccuaacaaucuagacaaguuuggacuugaccagaugccggcacgcaacucccgugugguuggcguuucguccaguuacggaaacuucuucuucucuggaaauuuccucggauuuguugauuccaucaccucugaacaaggaacuuacgcaagacucuuuagguacagggugacgaccuacaaaggauggugcggcucggcccuggucugugaggccgguggcguccgacgcaucauuggccugcauucugcuggcgccgccgguaucggcgccgggaccuauaucucaaaauuaggacuaaucaaagcccugaaacaccucggugaaccuuuggccacaaugcaaggacugaugacugaauuagagccuggaaucaccguacauguaccccggaaauccaaauugagaaagacgaccgcacacgcgguguacaaaccggaguuugagccugcuguguugucaaaauuugaucccagacugaacaaggauguugacuuggaugaaguaauuuggucuaaacacacugccaaugucccuuaccaaccuccuuuguucuacacauacaugucagaguacgcucaucgagucuucuccuucuuggggaaagacaaugacauucugaccgucaaagaagcaauucugggcauccccggacuagaccccauggauccccacacagcuccgggucugccuuacgccaucaacggccuucgacguacugaucucgucgauuuugugaacgguacaguagaugcggcgcuggcuguacaaauccagaaauucuuagacggugacuacucugaccaugucuuccaaacuuuucugaaagaugagaucagacccucagagaaaguccgagcgggaaaaacccgcauuguugaugugcccucccuggcgcauugcauugugggcagaauguugcuugggcgcuuugcugccaaguuucaaucccauccuggcuuucuccucggcucugcuaucgggucugacccugauguuuucuggaccgucauaggggcucaacucgaggggagaaagaacacguaugacguggacuacagugccuuugacucuucacacggcacuggcuccuucgaggcucucaucucucacuuuuucaccguggacaaugguuuuagcccugcgcugggaccguaucucagaucccuggcugucucggugcacgcuuacggcgagcgucgcaucaagauuaccgguggccuccccuccgguugugccgcgaccagccugcugaacacagugcucaacaaugugaucaucaggacugcucuggcauugacuuacaaggaauuugaauaugacaugguugauaucaucgccuacggugacgaccuucugguuggcacggauuacgaucuggacuucaaugagguggcacgacgcgcugccaaguugggguauaagaugacuccugccaacaaggguucugucuucccuccgacuuccucucuuuccgaugcuguuuuucuaaagcgcaaauucguccaaaacaacgacggcuuauacaaaccaguuauggauuuaaagaauuuggaagccaugcucuccuacuucaaaccaggaacacuacucgagaagcugcaaucuguuucuauguuggcucaacauucuggaaaagaagaauaugauagauugaugcaccccuucgcugacuacggugccguaccgagucacgaguaccugcaggcaagauggagggccuuguucgacugacccagauagcccaaggcgcuucggugcugccggcgauucugggagaacucagucggaacagaaaagggaaaaaaaaaaaaaaaaaaaaaaaaaaaaaa

SEQ ID NO: 59 - DNA, 9612 bp, Artificial Sequence
  Viper-SVVTrunc10-IL-2 Gsfurin IGSF1 IL-36g
ctgacggatggcctttttgcgtttctacaaactcttcctgttagttagttacttaagctcgggccccaaataatgattttattttgactgatagtgacctgttcgttgcaacaaattgataagcaatgcttttttataatgccaacattgattattgactagttattaatagtaatcaattacggggtcattagttcatagcccatatatggagttccgcgttacataacttacggtaaatggcccgcctggctgaccgcccaacgacccccgcccattgacgtcaataatgacgtatgttcccatagtaacgccaatagggactttccattgacgtcaatgggtggagtatttacggtaaactgcccacttggcagtacatcaagtgtatcatatgccaagtacgccccctattgacgtcaatgacggtaaatggcccgcctggcattatgcccagtacatgaccttatgggactttcctacttggcagtacatctacgtattagtcatcgctattaccatggtgatgcggttttggcagtacatcaatgggcgtggatagcggtttgactcacggggatttccaagtctccaccccattgacgtcaatgggagtttgttttggcaccaaaatcaacgggactttccaaaatgtcgtaacaactccgccccattgacgcaaatgggcggtaggcgtgtacggtgggaggtctatataagcagagctctctggctaactagagaacccactgcttactggcttatcgaaattaatacgactcactatagggagacccaagctggctagcgtttaaacttaagcttggtaccttatcaaactgatgagtccgtgaggacgaaacgagtaagctcgtctttgaaatggggggctgggccctgatgcccagtccttcctttccccttccggggggttaaccggctgtgtttgctagaggcacagaggggcaacatccaacctgcttttgcggggaacggtgcggctccgattcctgcgtcgccaaaggtgttagcgcacccaaacggcgcacctaccaatgttattggtgtggtctgcgagttctagcctactcgtttctcccccgaccattcactcacccacgaaaagtgtgttgtaaccataagatttaacccccgcacgggatgtgcgataaccgtaagactggctcaagcgcggaaagcgctgtaaccacatgctgttagtccctttatggctgcaagatggctacccacctcggatcactgaactggagctcgaccctccttagtaagggaaccgagaggccttcgtgcaacaagctccgacacagagtccacgtgactgctaccaccatgagtacatggttctcccctctcgacccaggacttctttttgaatatccacggctcgatccagagggtggggcatgacccctagcatagcgagctacagcgggaactgtagctaggccttagcgtgccttggatactgcctgatagggcgacggcctagtcgtgtcggttctataggtagcacatacaaatatgcagaactctcatttttctttcgatacagcctctggcacctttgaagatgtaaccggaacaaaagtcaagatcgttgaataccccagatcggtgaacaatggtgtttacgattcgtctactcatttggagatactgaacctacagggtgaaattgaaattttaaggtctttcaatgaataccaaattcgcgccgccaaacaacaactcggactggacatcgtgtacgaactacagggtaatgttcagacaacgtcaaagaatgattttgattcccgtggcaataatggtaacatgaccttcaattactacgcaaacacttatcagaattcagtagacttctcgacctcctcgtcggcgtcaggcgccggacctgggaactctcggggcggattagcgggtctcctcacaaatttcagtggaatcttgaaccctcttggctacctcaaagatcacaacaccgaagaaatggaaaactctgctgatcgagtcacaacgcaaacggcgggcaacactgccataaacacgcaatcatcattgggtgtgttgtgtgcctacgttgaagacccgaccaaatctgatcctccgtccagctctggcgatatcgagaccaatcccgggccgatgtacagcatgcagctcgcatcctgtgtcacattgacacttgtgctccttgtcaacagcgcacccacttcaagctccacttcaagctctacagcggaagcacagcagcagcagcagcagcagcagcagcagcagcagcacctggagcagctgttgatggacctacaggagctcctgagcaggatggagaattacaggaacctgaaactccccaggatgctcaccttcaaattttacttgcccaagcaggccacagaattgaaagatcttcagtgcctagaagatgaacttggacctctgcggcatgttctggatttgactcaaagcaaaagctttcaattggaagatgctgagaatttcatcagcaatatcagagtaactgttgtaaaactaaagggctctgacaacacatttgagtgccaattcgatgatgagtcagcaactgtggtggactttctgaggagatggatagccttctgtcaaagcatcatctcaacaagccctcaacaccaccatcatcaccacggctctaggaggaagagaggctctaggaggaagagaggctctaatgaagctatcaggttgtctctaatcatgcagcttgttgccttgctgttggtagtgctgtggataaggtggaagtgtcggagactcagaatcagagaagcctggttgctgggaacagctcaaggggtcaccatgctcttcatagtcacggcccttctctgctgtggactgtgcaatgggtcaatgtgtaaacctattactgggactattaatgatttgaatcagcaagtgtggacccttcagggtcagaaccttgtggcagttccacgaagtgacagtgtgaccccagtcactgttgctgttatcacatgcaagtatccagaggctcttgagcaaggcagaggggatcccatttatttgggaatccagaatccagaaatgtgtttgtattgtgagaaggttggagaacagcccacattgcagctaaaagagcagaagatcatggatctgtatggccaacccgagcccgtgaaacccttccttttctaccgtgccaagactggtaggacctccacccttgagtctgtggccttcccggactggttcattgcctcctccaagagagaccagcccatcattctgacttcagaacttgggaagtcatacaacactgcctttgaattaaatataaatgacgagggcagaggaagtctgctaacatgcggtgacgtcgaggagaatcccgggcctgcttctgacaacccaattttggagtttcttgaagcagaaaatgatctagtcactctggcctctctctggaagatggtgcactctgttcaacagacctggagaaagtatgtgaagaacgatgatttttggcccaatttactcagcgagctagtgggggaaggctctgtcgccttggccgccacgctatccaaccaagcttcagtaaaggctcttttgggcctgcactttctctctcgggggctcaattacactgacttttactctttactgatagagaaatgctctagtttctttaccgtagaaccacctcctccaccagctgaaaacctgatgaccaagccctcagtgaagtcgaaattccgaaaactgtttaagatgcaaggacccatggacaaagtcaaagactggaaccaaatagctgccggcttgaagaattttcaatttgttcgtgacctagtcaaagaggtggtcgattggctgcaggcctggatcaacaaagagaaagccagccctgtcctccagtaccagttggagatgaagaagctcgggcctgtggccttggctcatgacgctttcatggctggttccgggccccctcttagcgacgaccagattgaatacctccagaacctcaaatctcttgccctaacactggggaagactaatttggcccaaagtctcaccactatgatcaatgccaaacaaagttcagcccaacgagttgaacccgttgtggtggtccttagaggcaagccgggatgcggcaagagcttggcctctacgttgattgcccaggctgtgtccaagcgcctctatggctcccaaagtgtatattctcttcccccagatccagatttcttcgatggatacaaaggacagttcgtgaccttgatggatgatttgggacaaaacccggatggacaagatttctccaccttttgtcagatggtgtcgaccgcccaatttctccccaacatggcggaccttgcagagaaagggcgtccctttacctccaatctcatcattgcaactacaaatctcccccacttcagtcctgtcaccattgctgatccttctgcagtctctcgccgtatcaactacgatctgactctagaagtatctgaggcctacaagaaacacacacggctgaattttgacttggctttcaggcgcacagacgccccccccatttatccttttgctgcccatgtgccctttgtggacgtagctgtgcgcttcaaaaatggtcaccagaattttaatctcctagagttggtcgattccatttgtacagacattcgagccaagcaacaaggtgcccgaaacatgcagactctggttctacagagccccaacgagaatgatgacacccccgtcgacgaggcgttgggtagagttctctcccccgctgcggtcgatgaggcgcttgtcgacctcactccagaggccgacccggttggccgtttggctattcttgccaagctaggtcttgccctagctgcggtcacccctggtctgataatcttggcagtgggactctacaggtacttctctggctctgatgcagaccaagaagaaacagaaagtgagggatctgtcaaggcacccaggagcgaaaatgcttatgacggcccgaagaaaaactctaagccccctggagcactctctctcatggaaatgcaacagcccaacgtggacatgggctttgaggctgcggtcgctaagaaagtggtcgtccccattaccttcatggttcccaacagaccttctgggcttacacagtccgctcttctggtgaccggccggaccttcctaatcaatgaacatacatggtccaatccctcctggaccagcttcacaatccgcggtgaggtacacactcgtgatgagcccttccaaacggttcatttcactcaccacggtattcccacagatctgatgatggtacgtctcggaccgggcaattctttccctaacaatctagacaagtttggacttgaccagatgccggcacgcaactcccgtgtggttggcgtttcgtccagttacggaaacttcttcttctctggaaatttcctcggatttgttgattccatcacctctgaacaaggaacttacgcaagactctttaggtacagggtgacgacctacaaaggatggtgcggctcggccctggtctgtgaggccggtggcgtccgacgcatcattggcctgcattctgctggcgccgccggtatcggcgccgggacctatatctcaaaattaggactaatcaaagccctgaaacacctcggtgaacctttggccacaatgcaaggactgatgactgaattagagcctggaatcaccgtacatgtaccccggaaatccaaattgagaaagacgaccgcacacgcggtgtacaaaccggagtttgagcctgctgtgttgtcaaaatttgatcccagactgaacaaggatgttgacttggatgaagtaatttggtctaaacacactgccaatgtcccttaccaacctcctttgttctacacatacatgtcagagtacgctcatcgagtcttctccttcttggggaaagacaatgacattctgaccgtcaaagaagcaattctgggcatccccggactagaccccatggatccccacacagctccgggtctgccttacgccatcaacggccttcgacgtactgatctcgtcgattttgtgaacggtacagtagatgcggcgctggctgtacaaatccagaaattcttagacggtgactactctgaccatgtcttccaaacttttctgaaagatgagatcagaccctcagagaaagtccgagcgggaaaaacccgcattgttgatgtgccctccctggcgcattgcattgtgggcagaatgttgcttgggcgctttgctgccaagtttcaatcccatcctggctttctcctcggctctgctatcgggtctgaccctgatgttttctggaccgtcataggggctcaactcgaggggagaaagaacacgtatgacgtggactacagtgcctttgactcttcacacggcactggctccttcgaggctctcatctctcactttttcaccgtggacaatggttttagccctgcgctgggaccgtatctcagatccctggctgtctcggtgcacgcttacggcgagcgtcgcatcaagattaccggtggcctcccctccggttgtgccgcgaccagcctgctgaacacagtgctcaacaatgtgatcatcaggactgctctggcattgacttacaaggaatttgaatatgacatggttgatatcatcgcctacggtgacgaccttctggttggcacggattacgatctggacttcaatgaggtggcacgacgcgctgccaagttggggtataagatgactcctgccaacaagggttctgtcttccctccgacttcctctctttccgatgctgtttttctaaagcgcaaattcgtccaaaacaacgacggcttatacaaaccagttatggatttaaagaatttggaagccatgctctcctacttcaaaccaggaacactactcgagaagctgcaatctgtttctatgttggctcaacattctggaaaagaagaatatgatagattgatgcaccccttcgctgactacggtgccgtaccgagtcacgagtacctgcaggcaagatggagggccttgttcgactgacccagatagcccaaggcgcttcggtgctgccggcgattctgggagaactcagtcggaacagaaaagggaaaaaaaaaaaaaaaaaaaaaaaaaaaaaaggccggcatggtcccagcctcctcgctggcgccggctgggcaacatgcttcggcatggcgaatgggacgcggccgctcgagtctagagggcccgtttaaacccgctgatcagcctcgactgtgccttctagttgccagccatctgttgtttgcccctcccccgtgccttccttgaccctggaaggtgccactcccactgtcctttcctaataaaatgaggaaattgcatcgcattgtctgagtaggtgtcattctattctggggggtggggtggggcaggacagcaagggggaggattgggaagacaatagcaggcatgctggggatgcggtgggctctatgggttggcattataagaaagcattgcttatcaatttgttgcaacgaacaggtcactatcagtcaaaataaaatcattatttgccatccagctgcagctctggcccgtgtctcaaaatctctgatgttacattgcacaagataaaaatatatcatcatgaacaataaaactgtctgcttacataaacagtaatacaaggggtgttatgagccatattcaacgggaaacgtcgaggccgcgattaaattccaacatggatgctgatttatatgggtataaatgggctcgcgataatgtcgggcaatcaggtgcgacaatctatcgcttgtatgggaagcccgatgcgccagagttgtttctgaaacatggcaaaggtagcgttgccaatgatgttacagatgagatggtcagactaaactggctgacggaatttatgcctcttccgaccatcaagcattttatccgtactcctgatgatgcatggttactcaccactgcgatccccggaaaaacagcattccaggtattagaagaatatcctgattcaggtgaaaatattgttgatgcgctggcagtgtccctgcgccggttgcattcgattcctgtttgtaattgtccttttaacagcgatcgcgtatttcgtctcgctcaggcgcaatcacgaatgaataacggtttggttgatgcgagtgattttgatgacgagcgtaatggctggcctgttgaacaagtctggaaagaaatgcataaacttttgccattctcaccggattcagtcgtcactcatggtgatttctcacttgataaccttatttttgacgaggggaaattaataggttgtattgatgttggacgagtcggaatcgcagaccgataccaggatcttgccatcctatggaactgcctcggtgagttttctccttcattacagaaacggctttttcaaaaatatggtattgataatcctgatatgaataaattgcagtttcatttgatgctcgatgagtttttctaatcagaattggttaattggttgtaacattattcagattgggccccgttccactgagcgtcagaccccgtagaaaagatcaaaggatcttcttgagatcctttttttctgcgcgtaatctgctgcttgcaaacaaaaaaaccaccgctaccagcggtggtttgtttgccggatcaagagctaccaactctttttccgaaggtaactggcttcagcagagcgcagataccaaatactgttcttctagtgtagccgtagttaggccaccacttcaagaactctgtagcaccgcctacatacctcgctctgctaatcctgttaccagtggctgctgccagtggcgataagtcgtgtcttaccgggttggactcaagacgatagttaccggataaggcgcagcggtcgggctgaacggggggttcgtgcacacagcccagcttggagcgaacgacctacaccgaactgagatacctacagcgtgagctatgagaaagcgccacgcttcccgaagggagaaaggcggacaggtatccggtaagcggcagggtcggaacaggagagcgcacgagggagcttccagggggaaacgcctggtatctttatagtcctgtcgggtttcgccacctctgacttgagcgtcgatttttgtgatgctcgtcaggggggcggagcctatggaaaaacgccagcaacgcggcctttttacggttcctggccttttgctggccttttgctcacatgttctttcctgcgttatcccctgattctgtggataaccgtattaccgctagcatggatctcggggacgtctaactactaagcgagagtagggaactgccaggcatcaaataaaacgaaaggctcagtcggaagactgggcctttcgttttatctgttgtttgtcggtgaacgctctcctgagtaggacaaatccgccgggagcggatttgaacgttgtgaagcaacggcccggagggtggcgggcaggacgcccgccataaactgccaggcatcaaactaagcagaaggccatc

SEQ ID NO: 60 - RNA, 6350 nt, Artificial Sequence
  Viper-SVVTrunc10-IL-2 Gsfurin IGSF1 IL-36g RNA
uuugaaauggggggcugggcccugaugcccaguccuuccuuuccccuuccgggggguuaaccggcuguguuugcuagaggcacagaggggcaacauccaaccugcuuuugcggggaacggugcggcuccgauuccugcgucgccaaagguguuagcgcacccaaacggcgcaccuaccaauguuauugguguggucugcgaguucuagccuacucguuucucccccgaccauucacucacccacgaaaaguguguuguaaccauaagauuuaacccccgcacgggaugugcgauaaccguaagacuggcucaagcgcggaaagcgcuguaaccacaugcuguuagucccuuuauggcugcaagauggcuacccaccucggaucacugaacuggagcucgacccuccuuaguaagggaaccgagaggccuucgugcaacaagcuccgacacagaguccacgugacugcuaccaccaugaguacaugguucuccccucucgacccaggacuucuuuuugaauauccacggcucgauccagaggguggggcaugaccccuagcauagcgagcuacagcgggaacuguagcuaggccuuagcgugccuuggauacugccugauagggcgacggccuagucgugucgguucuauagguagcacauacaaauaugcagaacucucauuuuucuuucgauacagccucuggcaccuuugaagauguaaccggaacaaaagucaagaucguugaauaccccagaucggugaacaaugguguuuacgauucgucuacucauuuggagauacugaaccuacagggugaaauugaaauuuuaaggucuuucaaugaauaccaaauucgcgccgccaaacaacaacucggacuggacaucguguacgaacuacaggguaauguucagacaacgucaaagaaugauuuugauucccguggcaauaaugguaacaugaccuucaauuacuacgcaaacacuuaucagaauucaguagacuucucgaccuccucgucggcgucaggcgccggaccugggaacucucggggcggauuagcgggucuccucacaaauuucaguggaaucuugaacccucuuggcuaccucaaagaucacaacaccgaagaaauggaaaacucugcugaucgagucacaacgcaaacggcgggcaacacugccauaaacacgcaaucaucauuggguguguugugugccuacguugaagacccgaccaaaucugauccuccguccagcucuggcgauaucgagaccaaucccgggccgauguacagcaugcagcucgcauccugugucacauugacacuugugcuccuugucaacagcgcacccacuucaagcuccacuucaagcucuacagcggaagcacagcagcagcagcagcagcagcagcagcagcagcagcaccuggagcagcuguugauggaccuacaggagcuccugagcaggauggagaauuacaggaaccugaaacuccccaggaugcucaccuucaaauuuuacuugcccaagcaggccacagaauugaaagaucuucagugccuagaagaugaacuuggaccucugcggcauguucuggauuugacucaaagcaaaagcuuucaauuggaagaugcugagaauuucaucagcaauaucagaguaacuguuguaaaacuaaagggcucugacaacacauuugagugccaauucgaugaugagucagcaacugugguggacuuucugaggagauggauagccuucugucaaagcaucaucucaacaagcccucaacaccaccaucaucaccacggcucuaggaggaagagaggcucuaggaggaagagaggcucuaaugaagcuaucagguugucucuaaucaugcagcuuguugccuugcuguugguagugcuguggauaagguggaagugucggagacucagaaucagagaagccugguugcugggaacagcucaaggggucaccaugcucuucauagucacggcccuucucugcuguggacugugcaaugggucaauguguaaaccuauuacugggacuauuaaugauuugaaucagcaaguguggacccuucagggucagaaccuuguggcaguuccacgaagugacagugugaccccagucacuguugcuguuaucacaugcaaguauccagaggcucuugagcaaggcagaggggaucccauuuauuugggaauccagaauccagaaauguguuuguauugugagaagguuggagaacagcccacauugcagcuaaaagagcagaagaucauggaucuguauggccaacccgagcccgugaaacccuuccuuuucuaccgugccaagacugguaggaccuccacccuugagucuguggccuucccggacugguucauugccuccuccaagagagaccagcccaucauucugacuucagaacuugggaagucauacaacacugccuuugaauuaaauauaaaugacgagggcagaggaagucugcuaacaugcggugacgucgaggagaaucccgggccugcuucugacaacccaauuuuggaguuucuugaagcagaaaaugaucuagucacucuggccucucucuggaagauggugcacucuguucaacagaccuggagaaaguaugugaagaacgaugauuuuuggcccaauuuacucagcgagcuagugggggaaggcucugucgccuuggccgccacgcuauccaaccaagcuucaguaaaggcucuuuugggccugcacuuucucucucgggggcucaauuacacugacuuuuacucuuuacugauagagaaaugcucuaguuucuuuaccguagaaccaccuccuccaccagcugaaaaccugaugaccaagcccucagugaagucgaaauuccgaaaacuguuuaagaugcaaggacccauggacaaagucaaagacuggaaccaaauagcugccggcuugaagaauuuucaauuuguucgugaccuagucaaagagguggucgauuggcugcaggccuggaucaacaaagagaaagccagcccuguccuccaguaccaguuggagaugaagaagcucgggccuguggccuuggcucaugacgcuuucauggcugguuccgggcccccucuuagcgacgaccagauugaauaccuccagaaccucaaaucucuugcccuaacacuggggaagacuaauuuggcccaaagucucaccacuaugaucaaugccaaacaaaguucagcccaacgaguugaacccguuguggugguccuuagaggcaagccgggaugcggcaagagcuuggccucuacguugauugcccaggcuguguccaagcgccucuauggcucccaaaguguauauucucuucccccagauccagauuucuucgauggauacaaaggacaguucgugaccuugauggaugauuugggacaaaacccggauggacaagauuucuccaccuuuugucagauggugucgaccgcccaauuucuccccaacauggcggaccuugcagagaaagggcgucccuuuaccuccaaucucaucauugcaacuacaaaucucccccacuucaguccugucaccauugcugauccuucugcagucucucgccguaucaacuacgaucugacucuagaaguaucugaggccuacaagaaacacacacggcugaauuuugacuuggcuuucaggcgcacagacgccccccccauuuauccuuuugcugcccaugugcccuuuguggacguagcugugcgcuucaaaaauggucaccagaauuuuaaucuccuagaguuggucgauuccauuuguacagacauucgagccaagcaacaaggugcccgaaacaugcagacucugguucuacagagccccaacgagaaugaugacacccccgucgacgaggcguuggguagaguucucucccccgcugcggucgaugaggcgcuugucgaccucacuccagaggccgacccgguuggccguuuggcuauucuugccaagcuaggucuugcccuagcugcggucaccccuggucugauaaucuuggcagugggacucuacagguacuucucuggcucugaugcagaccaagaagaaacagaaagugagggaucugucaaggcacccaggagcgaaaaugcuuaugacggcccgaagaaaaacucuaagcccccuggagcacucucucucauggaaaugcaacagcccaacguggacaugggcuuugaggcugcggucgcuaagaaaguggucguccccauuaccuucaugguucccaacagaccuucugggcuuacacaguccgcucuucuggugaccggccggaccuuccuaaucaaugaacauacaugguccaaucccuccuggaccagcuucacaauccgcggugagguacacacucgugaugagcccuuccaaacgguucauuucacucaccacgguauucccacagaucugaugaugguacgucucggaccgggcaauucuuucccuaacaaucuagacaaguuuggacuugaccagaugccggcacgcaacucccgugugguuggcguuucguccaguuacggaaacuucuucuucucuggaaauuuccucggauuuguugauuccaucaccucugaacaaggaacuuacgcaagacucuuuagguacagggugacgaccuacaaaggauggugcggcucggcccuggucugugaggccgguggcguccgacgcaucauuggccugcauucugcuggcgccgccgguaucggcgccgggaccuauaucucaaaauuaggacuaaucaaagcccugaaacaccucggugaaccuuuggccacaaugcaaggacugaugacugaauuagagccuggaaucaccguacauguaccccggaaauccaaauugagaaagacgaccgcacacgcgguguacaaaccggaguuugagccugcuguguugucaaaauuugaucccagacugaacaaggauguugacuuggaugaaguaauuuggucuaaacacacugccaaugucccuuaccaaccuccuuuguucuacacauacaugucagaguacgcucaucgagucuucuccuucuuggggaaagacaaugacauucugaccgucaaagaagcaauucugggcauccccggacuagaccccauggauccccacacagcuccgggucugccuuacgccaucaacggccuucgacguacugaucucgucgauuuugugaacgguacaguagaugcggcgcuggcuguacaaauccagaaauucuuagacggugacuacucugaccaugucuuccaaacuuuucugaaagaugagaucagacccucagagaaaguccgagcgggaaaaacccgcauuguugaugugcccucccuggcgcauugcauugugggcagaauguugcuugggcgcuuugcugccaaguuucaaucccauccuggcuuucuccucggcucugcuaucgggucugacccugauguuuucuggaccgucauaggggcucaacucgaggggagaaagaacacguaugacguggacuacagugccuuugacucuucacacggcacuggcuccuucgaggcucucaucucucacuuuuucaccguggacaaugguuuuagcccugcgcugggaccguaucucagaucccuggcugucucggugcacgcuuacggcgagcgucgcaucaagauuaccgguggccuccccuccgguugugccgcgaccagccugcugaacacagugcucaacaaugugaucaucaggacugcucuggcauugacuuacaaggaauuugaauaugacaugguugauaucaucgccuacggugacgaccuucugguuggcacggauuacgaucuggacuucaaugagguggcacgacgcgcugccaaguugggguauaagaugacuccugccaacaaggguucugucuucccuccgacuuccucucuuuccgaugcuguuuuucuaaagcgcaaauucguccaaaacaacgacggcuuauacaaaccaguuauggauuuaaagaauuuggaagccaugcucuccuacuucaaaccaggaacacuacucgagaagcugcaaucuguuucuauguuggcucaacauucuggaaaagaagaauaugauagauugaugcaccccuucgcugacuacggugccguaccgagucacgaguaccugcaggcaagauggagggccuuguucgacugacccagauagcccaaggcgcuucggugcugccggcgauucugggagaacucagucggaacagaaaagggaaaaaaaaaaaaaaaaaaaaaaaaaaaaaa

SEQ ID NO: 61 - DNA, 8140 bp, Artificial Sequence
  NEP-BV-CVA21-mCH-Replicon
aagcggccgcgcgactcaattaccacttttgggtttggtcatcagagcaagggcgaggaggataacatggccatcatcaaggagttcatgcgcttcaaggtgcacatggagggctccgtgaacggccacgagttcgagatcgagggcgagggcgagggccgcccctacgagggcacccagaccgccaagctgaaggtgaccaagggtggccccctgcccttcgcctgggacatcctgtcccctcagttcatgtacggctccaaggcctacgtgaagcaccccgccgacatccccgactacttgaagctgtccttccccgagggcttcaagtgggagcgcgtgatgaacttcgaggacggcggcgtggtgaccgtgacccaggactcctccctgcaggacggcgagttcatctacaaggtgaagctgcgcggcaccaacttcccctccgacggccccgtaatgcagaagaagaccatgggctgggaggcctcctccgagcggatgtaccccgaggacggcgccctgaagggcgagatcaagcagaggctgaagctgaaggacggcggccactacgacgctgaggtcaagaccacctacaaggccaagaagcccgtgcagctgcccggcgcctacaacgtcaacatcaagttggacatcacctcccacaacgaggactacaccatcgtggaacagtacgaacgcgccgagggccgccactccaccggcggcatggacgagctgtacaagagatctgactcaattaccacttttgggtttggtcatcagaacaaagcagtgtacgttgccggttacaagatttgcaactaccacctagcaaccccaagtgatcacttgaatgcaattagtatgttatgggacagggatttaatggtggtggaatctagagcccagggaactgataccatcgccagatgtagttgcaggtgtggagtttactattgtgaatctaggaggaagtactaccctgtcacttttactggcccaacgtttcgattcatggaagcaaacgactactatccagcaagataccagtctcacatgctgatagggtgcggatttgcagaacccggggactgcggtgggatactgaggtgcactcatggggtaattggtatcattactgcaggaggtgaaggggtagtagcctttgctgacattagagacctctgggtgtatgaagaggaggccatggaacagggaataacaagctacatcgaatctctcggcacagcctttggcgcagggttcacccacacaatcagtgagaaagtgactgaattgacaacaatggttaccagcactatcacagaaaaactactgaaaaacttggtgaaaatagtgtcggctctagtgattgttgtgagaaattatgaggacactaccacgatccttgcaacactagcactactcgggtgtgatatatctccttggcaatggttgaagaagaaggcatgtgacttactagagattccttatgtgatgcgccaaggtgatgggtggatgaagaaattcacagaggcgtgcaatgcagctaaaggcttagagtggattagcaacaaaatttccaagtttatagattggttgaagtgtaaaattatcccagacgctaaggacaaggtggaatttctcaccaagttgaaacagctagacatgttggaaaatcaaattgcaaccatccaccaatcttgccccagccaagaacaacaagagattcttttcaacaatgtgagatggctagcagtccagtcccgtcggtttgcaccattatacgctgtggaggcacgccgaattaacaaaatggagagcacaataaacaattatatacagttcaagagcaaacaccgtattgaaccagtatgtatgctcattcatgggtcaccagggacgggtaaatctatagctacttcattaataggtagagcaatagcagagaaggaaagcacatcagtctattcaatgccacctgacccatctcactttgatggctataaacaacaaggggtagtgattatggacgacctaaaccaaaaccccgatggtatggacatgaaactgttttgccaaatggtatcaacagtggagtttattcctccaatggcctcattagaggagaagggcattttgtttacatctgattatgtcctggcttctaccaactctcattcaattgtaccacccacagtggctcacagtgatgccttaaccagacgatttgcatttgatgtggaggtttacacgatgtctgaacattcagtcaaaggcaaactgaatatggccacggccactcaattgtgtaaggattgtccaacacctgcaaattttaaaaagtgttgccctctcgtttgtggaaaggccttgcaattaatggacaggtacaccagacaaaggttcactgtagatgagattaccacattaatcatgaatgagaaaaacagaagggccaatatcggcaattgcatggaagccttgtttcaaggaccattaaggtataaagatttgaagatcgatgtgaagacagttcccccccctgagtgcatcagtgatttgttacaagcagtggattctcaagaggttagggattactgtgagaagaaaggctggatcgttaacgttactagccagattcaactagaaaggaacatcaatagggccatgactatactccaagctgttaccacattcgcagcagtcgcaggagtagtgtatgtaatgtacaaactcttcgccggtcaacagggtgcatacactggcttgccaaacaaaaaacccaatgtccctactatcagagtcgctaaagtccaggggccaggatttgactacgcagtggcaatggcaaaaagaaacatagttactgcaaccaccaccaagggtgaatttaccatgctaggggtgcatgataatgtagcaatattgccaacccatgccgctccaggagaaaccattattattgatgggaaagaagtagagatcctagatgccagagccttagaagatcaagcgggaaccaatcttgagatcaccattattactctaaaaagaaatgagaagtttagagacatcagatcacatattcccacccaaattactgaaactaacgatggagtgttgatcgtgaacactagcaagtaccccaatatgtatgtccccgttggtgctgtgaccgaacagggatatcttaatctcagtggacgtcaaactgctcgcactttaatgtacaactttccaacaagggcaggccagtgcggaggaatcatcacttgtactggcaaagtcattgggatgcatgttggcgggaacggttcacatgggtttgcagcagccctcaagcgatcatacttcactcaaaatcagggcgaaatccagtggatgaggtcatcaaaagaagtggggtaccccattataaatgccccatccaagacaaagttagaacccagtgctttccactatgtttttgaaggtgttaaggaaccagctgtactcactaagaatgaccccagactaaaaacagattttgaagaagccatcttttctaaatatgtggggaacaaaattactgaagtggacgagtacatgaaagaagcagtggatcactatgcaggacagttaatgtcactggatatcaacacagaacagatgtgcctggaggatgccatgtacggcaccgatggtcttgaggccctggatcttagcactagtgctggatatccttatgttgcaatggggaaaaagaaaagagacattctagataaacagaccagagatactaaggagatgcagagacttttagatacctatggaatcaatctaccattagtcacgtacgtgaaagatgaactcaggtcaaagactaaagtggaacaaggaaagtcaagattgattgaagcttccagccttaatgattcagttgcaatgagaatggcctttggcaatctttacgcagctttccacaagaatccaggtgtggtgacaggatcagcagttggttgtgacccagatttgttttggagtaagataccagtgctaatggaagaaaaactcttcgcttttgactacacagggtatgatgcctcactcagccctgcttggtttgaagctcttaaaatggtgttagaaaaaattggatttggcagtagagtagactatatagactacctgaaccactctcaccacctttacaaaaacaagacttattgtgtcaaaggcggcatgccatccggctgctctggcacctcaattttcaactcaatgattaacaacctgatcattaggacgcttttactgagaacctacaagggcatagacttggaccatttaaaaatgattgcctatggtgatgacgtgatagcttcctacccccatgaggttgacgctagtctcctagcccaatcaggaaaagactatggactaaccatgactccagcagataaatcagtaacctttgaaacagtcacatgggagaatgtaacatttctgaaaagatttttcagagcagatgagaagtatccattcctggtgcatccagtgatgccaatgaaagaaattcacgaatcaatcagatggaccaaggaccctagaaacacacaggatcacgtacgctcgttgtgcctattagcttggcacaacggtgaagaagaatacaataaatttttagctaaaatcagaagtgtgccaatcggaagagctttattgctcccagagtactctacattgtaccgccgatggctcgactcattttagtaaccctacctcagtcggattggattgggttatactgttgtaggggtaaatttttctttaattcggagaaaaaaaaaaaaaaaaaaaaaaaaaaaaaaggccggcatggtcccagcctcctcgctggcgccggctgggcaacatgcttcggcatggcgaatgggacgctcgagtctagagggcagggcccgtttaaacccgctgatcagcctcgactgtgccttctagttgccagccatctgttgtttgcccctcccccgtgccttccttgaccctggaaggtgccactcccactgtcctttcctaataaaatgaggaaattgcatcgcattgtctgagtaggtgtcattctattctggggggtggggtggggcaggacagcaagggggaggattgggaagacaatagcaggcatgctggggatgcggtgggctctatggtgctggcgtttttccataggctccgcccccctgacgagcatcacaaaaatcgacgctcaagtcagaggtggcgaaacccgacaggactataaagataccaggcgtttccccctggaagctccctcgtgcgctctcctgttccgaccctgccgcttaccggatacctgtccgcctttctcccttcgggaagcgtggcgctttctcatagctcacgctgtaggtatctcagttcggtgtaggtcgttcgctccaagctgggctgtgtgcacgaaccccccgttcagcccgaccgctgcgccttatccggtaactatcgtcttgagtccaacccggtaagacacgacttatcgccactggcagcagccactggtaacaggattagcagagcgaggtatgtaggcggtgctacagagttcttgaagtggtggcctaactacggctacactagaagaacagtatttggtatctgcgctctgctgaagccagttaccttcggaaaaagagttggtagctcttgatccggcaaacaaaccaccgctggtagcggtggtttttttgtttgcaagcagcagattacgcgcagaaaaaaaggatctcaagaagatccttttaaaaaaattcatccaacaaacgataaaatgcaatacgttgactatctggtgctgcaataccatataaaactaaaaaacgatctgcccattcaccacctaattcttctgcaatatcacgagttgctaatgcaatatcttgataacgatctgcaacacctaaacgaccacaatcaatgaaaccactaaaacgaccattttcaaccataatatttggtaaacatgcatcaccatgagtaacaactaaatcttcaccatctggcatacttgcttttaaacgtgcaaacaattctgctggtgctaaaccttgatgttcttcatctaaatcatcttgatcaactaaacctgcttccatacgagtacgtgcacgttcaatacgatgttttgcttgatgatcaaatggacaagttgctggatctaaagtatgtaaacgacgcattgcatctgccataatactaactttttctgctggtgctaaatgactagataacaaatcttgacctggaacttcacctaacaacaaccaatcacgacctgcttcagtaacaacatctaaaactgctgcacatggaacaccagtagttgctaaccaacttaaacgtgctgcttcatcttgtaattcatttaatgcaccacttaaatcagttttaacaaacaaaactggacgaccttgtgcacttaaacgaaaaactgctgcatcagaacaaccaatagtttgttgtgcccaatcataaccaaacaaacgttcaacccatgctgctggactacctgcatgtaaaccatcttgttcaatcatactcttcctttttcaatattattgaagcatttatcagggttattgtctcatgagcggatacatatttgaagaattcacattgattattgactagttattaatagtaatcaattacggggtcattagttcatagcccatatatggagttccgcgttacataacttacggtaaatggcccgcctggctgaccgcccaacgacccccgcccattgacgtcaataatgacgtatgttcccatagtaacgccaatagggactttccattgacgtcaatgggtggagtatttacggtaaactgcccacttggcagtacatcaagtgtatcatatgccaagtacgccccctattgacgtcaatgacggtaaatggcccgcctggcattatgcccagtacatgaccttatgggactttcctacttggcagtacatctacgtattagtcatcgctattaccatggtgatgcggttttggcagtacatcaatgggcgtggatagcggtttgactcacggggatttccaagtctccaccccattgacgtcaatgggagtttgttttggcaccaaaatcaacgggactttccaaaatgtcgtaacaactccgccccattgacgcaaatgggcggtaggcgtgtacggtgggaggtctatataagcagagctctctggctaactagagaacccactgcttactggcttatcgaaattaatacgactcactatagggagacccaagctggctagcgtttaaacttaagcttggtaccgtttaaacttaagcttgtttaactgatgagtccgtgaggacgaaacgagtaagctcgtcttaaaacagctctggggttgttcccaccccagaggcccacgtggcggctagtactctggtattacggtacctttgtacgcctgttttgtatcccttcccccgtaactttagaagcttatcaaaagttcaatagcaggggtacaaaccagtacctctacgaacaagcacttctgtttccccggtgatatcacatagactgtacccacggtcaaaagtgattgatccgttatccgcttgagtacttcgagaagcctagtatcaccttggaatcttcgatgcgttgcgctcaacactctgccccgagtgtagcttaggctgatgagtctgggcactccccaccggcgacggtggcccaggctgcgttggcggcctacccatggctgatgccgtgggacgctagttgtgaacaaggtgtgaagagcctattgagctactcaagagtcctccggcccctgaatgcggctaatcctaaccacggagcaaccgctcacaacccagtgagtaggttgtcgtaatgcgtaagtctgtggcggaaccgactactttgggtgtccgtgtttccctttatattcatactggctgcttatggtgacaatttacaaattgttaccatatagctattggattggccacccagtattgtgcaatatatttgagtgtttctttcataagccttattaacatcacatttttaatcacaataaacagtgcaaatg

SEQ ID NO: 62 - RNA, 5572 nt, Artificial Sequence
  NEP-BV-CVA21-mCH-Replicon RNA
uuaaaacagcucugggguuguucccaccccagaggcccacguggcggcuaguacucugguauuacgguaccuuuguacgccuguuuuguaucccuucccccguaacuuuagaagcuuaucaaaaguucaauagcagggguacaaaccaguaccucuacgaacaagcacuucuguuuccccggugauaucacauagacuguacccacggucaaaagugauugauccguuauccgcuugaguacuucgagaagccuaguaucaccuuggaaucuucgaugcguugcgcucaacacucugccccgaguguagcuuaggcugaugagucugggcacuccccaccggcgacgguggcccaggcugcguuggcggccuacccauggcugaugccgugggacgcuaguugugaacaaggugugaagagccuauugagcuacucaagaguccuccggccccugaaugcggcuaauccuaaccacggagcaaccgcucacaacccagugaguagguugucguaaugcguaagucuguggcggaaccgacuacuuuggguguccguguuucccuuuauauucauacuggcugcuuauggugacaauuuacaaauuguuaccauauagcuauuggauuggccacccaguauugugcaauauauuugaguguuucuuucauaagccuuauuaacaucacauuuuuaaucacaauaaacagugcaaaugaagcggccgcgcgacucaauuaccacuuuuggguuuggucaucagagcaagggcgaggaggauaacauggccaucaucaaggaguucaugcgcuucaaggugcacauggagggcuccgugaacggccacgaguucgagaucgagggcgagggcgagggccgccccuacgagggcacccagaccgccaagcugaaggugaccaaggguggcccccugcccuucgccugggacauccuguccccucaguucauguacggcuccaaggccuacgugaagcaccccgccgacauccccgacuacuugaagcuguccuuccccgagggcuucaagugggagcgcgugaugaacuucgaggacggcggcguggugaccgugacccaggacuccucccugcaggacggcgaguucaucuacaaggugaagcugcgcggcaccaacuuccccuccgacggccccguaaugcagaagaagaccaugggcugggaggccuccuccgagcggauguaccccgaggacggcgcccugaagggcgagaucaagcagaggcugaagcugaaggacggcggccacuacgacgcugaggucaagaccaccuacaaggccaagaagcccgugcagcugcccggcgccuacaacgucaacaucaaguuggacaucaccucccacaacgaggacuacaccaucguggaacaguacgaacgcgccgagggccgccacuccaccggcggcauggacgagcuguacaagagaucugacucaauuaccacuuuuggguuuggucaucagaacaaagcaguguacguugccgguuacaagauuugcaacuaccaccuagcaaccccaagugaucacuugaaugcaauuaguauguuaugggacagggauuuaauggugguggaaucuagagcccagggaacugauaccaucgccagauguaguugcagguguggaguuuacuauugugaaucuaggaggaaguacuacccugucacuuuuacuggcccaacguuucgauucauggaagcaaacgacuacuauccagcaagauaccagucucacaugcugauagggugcggauuugcagaacccggggacugcggugggauacugaggugcacucaugggguaauugguaucauuacugcaggaggugaagggguaguagccuuugcugacauuagagaccucuggguguaugaagaggaggccauggaacagggaauaacaagcuacaucgaaucucucggcacagccuuuggcgcaggguucacccacacaaucagugagaaagugacugaauugacaacaaugguuaccagcacuaucacagaaaaacuacugaaaaacuuggugaaaauagugucggcucuagugauuguugugagaaauuaugaggacacuaccacgauccuugcaacacuagcacuacucgggugugauauaucuccuuggcaaugguugaagaagaaggcaugugacuuacuagagauuccuuaugugaugcgccaaggugauggguggaugaagaaauucacagaggcgugcaaugcagcuaaaggcuuagaguggauuagcaacaaaauuuccaaguuuauagauugguugaaguguaaaauuaucccagacgcuaaggacaagguggaauuucucaccaaguugaaacagcuagacauguuggaaaaucaaauugcaaccauccaccaaucuugccccagccaagaacaacaagagauucuuuucaacaaugugagauggcuagcaguccagucccgucgguuugcaccauuauacgcuguggaggcacgccgaauuaacaaaauggagagcacaauaaacaauuauauacaguucaagagcaaacaccguauugaaccaguauguaugcucauucaugggucaccagggacggguaaaucuauagcuacuucauuaauagguagagcaauagcagagaaggaaagcacaucagucuauucaaugccaccugacccaucucacuuugauggcuauaaacaacaagggguagugauuauggacgaccuaaaccaaaaccccgaugguauggacaugaaacuguuuugccaaaugguaucaacaguggaguuuauuccuccaauggccucauuagaggagaagggcauuuuguuuacaucugauuauguccuggcuucuaccaacucucauucaauuguaccacccacaguggcucacagugaugccuuaaccagacgauuugcauuugauguggagguuuacacgaugucugaacauucagucaaaggcaaacugaauauggccacggccacucaauuguguaaggauuguccaacaccugcaaauuuuaaaaaguguugcccucucguuuguggaaaggccuugcaauuaauggacagguacaccagacaaagguucacuguagaugagauuaccacauuaaucaugaaugagaaaaacagaagggccaauaucggcaauugcauggaagccuuguuucaaggaccauuaagguauaaagauuugaagaucgaugugaagacaguuccccccccugagugcaucagugauuuguuacaagcaguggauucucaagagguuagggauuacugugagaagaaaggcuggaucguuaacguuacuagccagauucaacuagaaaggaacaucaauagggccaugacuauacuccaagcuguuaccacauucgcagcagucgcaggaguaguguauguaauguacaaacucuucgccggucaacagggugcauacacuggcuugccaaacaaaaaacccaaugucccuacuaucagagucgcuaaaguccaggggccaggauuugacuacgcaguggcaauggcaaaaagaaacauaguuacugcaaccaccaccaagggugaauuuaccaugcuaggggugcaugauaauguagcaauauugccaacccaugccgcuccaggagaaaccauuauuauugaugggaaagaaguagagauccuagaugccagagccuuagaagaucaagcgggaaccaaucuugagaucaccauuauuacucuaaaaagaaaugagaaguuuagagacaucagaucacauauucccacccaaauuacugaaacuaacgauggaguguugaucgugaacacuagcaaguaccccaauauguauguccccguuggugcugugaccgaacagggauaucuuaaucucaguggacgucaaacugcucgcacuuuaauguacaacuuuccaacaagggcaggccagugcggaggaaucaucacuuguacuggcaaagucauugggaugcauguuggcgggaacgguucacauggguuugcagcagcccucaagcgaucauacuucacucaaaaucagggcgaaauccaguggaugaggucaucaaaagaagugggguaccccauuauaaaugccccauccaagacaaaguuagaacccagugcuuuccacuauguuuuugaagguguuaaggaaccagcuguacucacuaagaaugaccccagacuaaaaacagauuuugaagaagccaucuuuucuaaauauguggggaacaaaauuacugaaguggacgaguacaugaaagaagcaguggaucacuaugcaggacaguuaaugucacuggauaucaacacagaacagaugugccuggaggaugccauguacggcaccgauggucuugaggcccuggaucuuagcacuagugcuggauauccuuauguugcaauggggaaaaagaaaagagacauucuagauaaacagaccagagauacuaaggagaugcagagacuuuuagauaccuauggaaucaaucuaccauuagucacguacgugaaagaugaacucaggucaaagacuaaaguggaacaaggaaagucaagauugauugaagcuuccagccuuaaugauucaguugcaaugagaauggccuuuggcaaucuuuacgcagcuuuccacaagaauccagguguggugacaggaucagcaguugguugugacccagauuuguuuuggaguaagauaccagugcuaauggaagaaaaacucuucgcuuuugacuacacaggguaugaugccucacucagcccugcuugguuugaagcucuuaaaaugguguuagaaaaaauuggauuuggcaguagaguagacuauauagacuaccugaaccacucucaccaccuuuacaaaaacaagacuuauugugucaaaggcggcaugccauccggcugcucuggcaccucaauuuucaacucaaugauuaacaaccugaucauuaggacgcuuuuacugagaaccuacaagggcauagacuuggaccauuuaaaaaugauugccuauggugaugacgugauagcuuccuacccccaugagguugacgcuagucuccuagcccaaucaggaaaagacuauggacuaaccaugacuccagcagauaaaucaguaaccuuugaaacagucacaugggagaauguaacauuucugaaaagauuuuucagagcagaugagaaguauccauuccuggugcauccagugaugccaaugaaagaaauucacgaaucaaucagauggaccaaggacccuagaaacacacaggaucacguacgcucguugugccuauuagcuuggcacaacggugaagaagaauacaauaaauuuuuagcuaaaaucagaagugugccaaucggaagagcuuuauugcucccagaguacucuacauuguaccgccgauggcucgacucauuuuaguaacccuaccucagucggauuggauuggguuauacuguuguagggguaaauuuuucuuuaauucggagaaaaaaaaaaaaaaaaaaaaaaaaaaaaaa

SEQ ID NO: 63 - protein, 7 aa, Artificial Sequence
  2A peptide consensus
  MISC_FEATURE (2)..(2): Xaa is any amino acid
  MISC_FEATURE (4)..(4): Xaa is any amino acid
DXEXNPG

SEQ ID NO: 64 - protein, 18 aa, Artificial Sequence
  T2A
EGRGSLLTCGDVEENPGP

SEQ ID NO: 65 - protein, 19 aa, Artificial Sequence
  P2A
ATNFSLLKQAGDVEENPGP

SEQ ID NO: 66 - protein, 20 aa, Artificial Sequence
  E2A
QCTNYALLKLAGDVESNPGP

SEQ ID NO: 67 - protein, 22 aa, Artificial Sequence
  F2A
VKQTLNFDLLKLAGDVESNPGP

SEQ ID NO: 68 - protein, 10 aa, Artificial Sequence
  SVV 2A
SGDIETNPGP

SEQ ID NO: 69 - protein, 5 aa, Artificial Sequence
  Coxsackievirus 2A cleavage site
GFGHQ

SEQ ID NO: 70 - protein, 8 aa, Artificial Sequence
  SVV 3C cleavage site
IVYELQGP

SEQ ID NO: 71 - protein, 12 aa, Artificial Sequence
  SVV Furin-3C cleavage site
RRKRIVYELQGP

SEQ ID NO: 72 - protein, 4 aa, Artificial Sequence
  Furin consensus
  MISC_FEATURE (2)..(3): Xaa is any amino acid
RXXR

SEQ ID NO: 73 - protein, 4 aa, Artificial Sequence
  Furin consensus
  MISC_FEATURE (2)..(2): Xaa is any amino acid
  MISC_FEATURE (3)..(3): Xaa is Lys or Arg
RXXR

SEQ ID NO: 74 - protein, 4 aa, Artificial Sequence
  Furin cleavage site
RRKR

SEQ ID NO: 75 - protein, 60 aa, Artificial Sequence
  IGSF1
NEAIRLSLIMQLVALLLVVLWIRWKCRRLRIREAWLLGTAQGVTMLFIVTALLCCGLCNG

SEQ ID NO: 76 - protein, 14 aa, Artificial Sequence
  2x Furin with GS linker
GSRRKRGSRRKRGS

SEQ ID NO: 77 - protein, 74 aa, Artificial Sequence
  Furin - IGSF1
GSRRKRGSRRKRGSNEAIRLSLIMQLVALLLVVLWIRWKCRRLRIREAWLLGTAQGVTMLFIVTALLCCGLCNG

SEQ ID NO: 78 - protein, 6 aa, Artificial Sequence
  HIV protease site
IFLETS

SEQ ID NO: 79 - protein, 9 aa, Artificial Sequence
  HIV protease site
GSGIFLETS

SEQ ID NO: 80 - protein, 98 aa, Artificial Sequence
  HIV protease
QITLWQRPLVTIKIGGQLKEALLDTGADDTVLEEMSLPGRWKPKMIGGIGGFIKVRQYDQILIEICGHKAIGTVLVGPTPVNIIGRNLLTQIGCTLNF

SEQ ID NO: 81 - protein, 127 aa, Homo sapiens [sequence omitted]

SEQ ID NO: 82 - protein, 133 aa, Homo sapiens [sequence omitted]

SEQ ID NO: 83 - protein, 135 aa, Mus musculus
QQQQQQQQQQQQHLEQLLMDLQELLSRMENYRNLKLPRMLTFKFYLPKQATELKDLQCLEDELGPLRHVLDLTQSKSFQLEDAENFISNIRVTVVKLKGSDNTFECQFDDESATVVDFLRRWIAFCQSIISTSPQ

SEQ ID NO: 84 - protein, 306 aa, Homo sapiens
IWELKKDVYVVELDWYPDAPGEMVVLTCDTPEEDGITWTLDQSSEVLGSGKTLTIQVKEFGDAGQYTCHKGGEVLSHSLLLLHKKEDGIWSTDILKDQKEPKNKTFLRCEAKNYSGRFTCWWLTTISTDLTFSVKSSRGSSDPQGVTCGAATLSAERVRGDNKEYEYSVECQEDSACPAAEESLPIEVMVDAVHKLKYENYTSSFFIRDIIKPDPPKNLQLKPLKNSRQVEVSWEYPDTWSTPHSYFSLTFCVQVQGKSKREKKDRVFTDKTSATVICRKNASISVRAQDRYYSSSWSEWASVPCS

SEQ ID NO: 85 - protein, 197 aa, Homo sapiens
RNLPVATPDPGMFPCLHHSQNLLRAVSNMLQKARQTLEFYPCTSEEIDHEDITKDKTSTVEACLPLELTKNESCLNSRETSFITNGSCLASRKTSFMMALCLSSIYEDLKMYQVEFKTMNAKLLMDPKRQIFLDQNMLAVIDELMQALNFNSETVPQKSSLEEPDFYKTKIKLCILLHAFRIRAVTIDRVMSYLNAS

SEQ ID NO: 86 - protein, 170 aa, Homo sapiens
RAVPGGSSPAWTQCQQLSQKLCTLAWSAHPLVGHMDLREEGDEETTNDVPHIQCGDGCDPQGLRDNSQFCLQRIHQGLIFYEKLLGSDIFTGEPSLLPDSPVGQLHASLLGLSQLLQPEGHHWETQQIPSLSPSQPWQRLLLRFKILRSLQAFVAVAARVFAHGAATLSP

SEQ ID NO: 87 - protein, 157 aa, Homo sapiens
YFGKLESKLSVIRNLNDQVLFIDQGNRPLFEDMTDSDCRDNAPRTIFIISMYKDSQPRGMAVTISVKCEKISTLSCENKIISFKEMNPPDNIKDTKSDIIFFQRSVPGHDNKMQFESSSYEGYFLACEKERDLFKLILKKEDELGDRSIMFTVQNED

SEQ ID NO: 88 - protein, 152 aa, Homo sapiens
SMCKPITGTINDLNQQVWTLQGQNLVAVPRSDSVTPVTVAVITCKYPEALEQGRGDPIYLGIQNPEMCLYCEKVGEQPTLQLKEQKIMDLYGQPEPVKPFLFYRAKTGRTSTLESVAFPDWFIASSKRDQPIILTSELGKSYNTAFELNIND

SEQ ID NO: 89 - protein, 152 aa, Mus musculus
GRETPDFGEVFDLDQQVWIFRNQALVTVPRSHRVTPVSVTILPCKYPESLEQDKGIAIYLGIQNPDKCLFCKEVNGHPTLLLKEEKILDLYHHPEPMKPFLFYHTRTGGTSTFESVAFPGHYIASSKTGNPIFLTSKKGEYYNINFNLDIKS

SEQ ID NO: 90 - protein, 77 aa, Homo sapiens
VPLSRTVRCTCISISNQPVNPRSLEKLEIIPASQFCPRVEIIATMKKKGEKRCLNPESKAIKNLLKAVSKERSKRSP

SEQ ID NO: 91 - protein, 77 aa, Mus musculus
IPLARTVRCNCIHIDDGPVRMRAIGKLEIIPASLSCPRVEIIATMKKNDEQRCLNPESKTIKNLMKAFSQKRSKRAP

SEQ ID NO: 92 - protein, 92 aa, Homo sapiens
MKLCVTVLSLLMLVAAFCSPALSAPMGSDPPTACCFSYTARKLPRNFVVDYYETSSLCSQPAVVFQTKRSKQVCADPSESWVQEYVYDLELN

SEQ ID NO: 93 - protein, 68 aa, Homo sapiens
SPYSSDTTPCCFAYIARPLPRAHIKEYFYTSGKCSNPAVVFVTRKNRQVCANPEKKWVREYINSLEMS

SEQ ID NO: 94 - protein, 111 aa, Homo sapiens
SDGGAQDCCLKYSQRKIPAKVVRSYRKQEPSLGCSIPAILFLPRKRSQAELCADPKELWVQQLMQHLDKTPSPQKPAQGCRKDRGASKTGKKGKGSKGCKRTERSQTPKGP

SEQ ID NO: 95 - protein, 346 aa, Artificial Sequence
  anti-PD1-VHH-Fc(hIgG4)
QVQLVESGGGVVQPGGSLRLSCAASDSIDSLVNMGWYRQAPGKQRELVALIATYITHYADFVKGRFTISRDNSKNTLYLQMNSLRAEDTAVYYCYARNIIVDYWGQGTLVTVSSAAAESKYGPPCPPCPAPEFLGGPSVFLFPPKPKDTLMISRTPEVTCVVVDVSQEDPEVQFNWYVDGVEVHNAKTKPREEQFNSTYRVVSVLTVLHQDWLNGKEYKCKVSNKGLPSSIEKTISKAKGQPREPQVYTLPPSQEEMTKNQVSLTCLVKGFYPSDIAVEWESNGQPENNYKTTPPVLDSDGSFFLYSRLTVDKSRWQEGNVFSCSVMHEALHNHYTQKSLSLSPGK

SEQ ID NO: 96 - protein, 592 aa, Homo sapiens
AGVFELQIHSFGPGPGPGAPRSPCSARLPCRLFFRVCLKPGLSEEAAESPCALGAALSARGPVYTEQPGAPAPDLPLPDGLLQVPFRDAWPGTFSFIIETWREELGDQIGGPAWSLLARVAGRRRLAAGGPWARDIQRAGAWELRFSYRARCEPPAVGTACTRLCRPRSAPSRCGPGLRPCAPLEDECEAPLVCRAGCSPEHGFCEQPGECRCLEGWTGPLCTVPVSTSSCLSPRGPSSATTGCLVPGPGPCDGNPCANGGSCSETPRSFECTCPRGFYGLRCEVSGVTCADGPCFNGGLCVGGADPDSAYICHCPPGFQGSNCEKRVDRCSLQPCRNGGLCLDLGHALRCRCRAGFAGPRCEHDLDDCAGRACANGGTCVEGGGAHRCSCALGFGGRDCRERADPCAARPCAHGGRCYAHFSGLVCACAPGYMGARCEFPVHPDGASALPAAPPGLRPGDPQRYLLPPALGLLVAAGVAGAALLLVHVRRRGHSQDAGSRLLAGTPEPSVHALPDALNNLRTQEGSGDGPSSSVDWNRPEDVDPQGIYVISAPSIYAREVATPLFPPLHTGRAGQRQHLLFPYPSSILSVK

SEQ ID NO: 97 - protein, 117 aa, Artificial Sequence
  anti-FAP heavy chain variable region
QVQLQQSGAELARPGASVNLSCKASGYTFTNNGINWLKQRTGQGLEWIGEIYPRSTNTLYNEKFKGKATLTADRSSNTAYMELRSLTSEDSAVYFCARTLTAPFAFWGQGTLVTVSA

SEQ ID NO: 98 - protein, 107 aa, Artificial Sequence
  anti-FAP light chain variable region
QIVLTQSPAIMSASPGEKVTMTCSASSGVNFMHWYQQKSGTSPKRWIFDTSKLASGVPARFSGSGSGTSYSLTISSMEAEDAATYYCQQWSFNPPTFGGGTKLEIKR

SEQ ID NO: 99 - protein, 116 aa, Artificial Sequence
  CD3 heavy chain variable region
EVQLVESGGGLVQPGKSLKLSCEASGFTFSGYGMHWVRQAPGRGLESVAYITSSSINIKYADAVKGRFTVSRDNAKNLLFLQMNILKSEDTAMYYCARFDWDKNYWGQGTMVTVSS

SEQ ID NO: 100 - protein, 108 aa, Artificial Sequence
  CD3 light chain variable region
DIQMTQSPSSLPASLGDRVTINCQASQDISNYLNWYQQKPGKAPKLLIYYTNKLADGVPSRFSGSGSGRDSSFTISSLESEDIGSYYCQQYYNYPWTFGPGTKLEIKR

SEQ ID NO: 101 - protein, 498 aa, Artificial Sequence
  Blinatumomab
DIQLTQSPASLAVSLGQRATISCKASQSVDYDGDSYLNWYQQIPGQPPKLLIYDASNLVSGIPPRFSGSGSGTDFTLNIHPVEKVDAATYHCQQSTEDPWTFGGGTKLEIKGGGGSGGGGSGGGGSQVQLQQSGAELVRPGSSVKISCKASGYAFSSYWMNWVKQRPGQGLEWIGQIWPGDGDTNYNGKFKGKATLTADESSSTAYMQLSSLASEDSAVYFCARRETTTVGRYYYAMDYWGQGTTVTVSSGGGGSDIKLQQSGAELARPGASVKMSCKTSGYTFTRYTMHWVKQRPGQGLEWIGYINPSRGYTNYNQKFKDKATLTTDKSSSTAYMQLSSLTSEDSAVYYCARYYDDHYCLDYWGQGTTLTVSSVEGGSGGSGGSGGSGGVDDIQLTQSPAIMSASPGEKVTMTCRASSSVSYMNWYQQKSGTSPKRWIYDTSKVASGVPYRFSGSGSGTSYSLTISSMEAEDAATYYCQQWSSNPLTFGAGTKLELK

SEQ ID NO: 102 - protein, 496 aa, Artificial Sequence
  MT110
ELVMTQSPSSLTVTAGEKVTMSCKSSQSLLNSGNQKNYLTWYQQKPGQPPKLLIYWASTRESGVPDRFTGSGSGTDFTLTISSVQAEDLAVYYCQNDYSYPLTFGAGTKLEIKGGGGSGGGGSGGGGSEVQLLEQSGAELVRPGTSVKISCKASGYAFTNYWLGWVKQRPGHGLEWIGDIFPGSGNIHYNEKFKGKATLTADKSSSTAYMQLSSLTFEDSAVYFCARLRNWDEPMDYWGQGTTVTVSSGGGGSDVQLVQSGAEVKKPGASVKVSCKASGYTFTRYTMHWVRQAPGQGLEWIGYINPSRGYTNYADSVKGRFTITTDKSTSTAYMELSSLRSEDTATYYCARYYDDHYCLDYWGQGTTVTVSSGEGTSTGSGGSGGSGGADDIVLTQSPATLSLSPGERATLSCRASQSVSYMNWYQQKPGKAPKRWIYDTSKVASGVPARFSGSGSGTDYSLTINSLEAEDAATYYCQQWSSNPLTFGGGTKVEIK

SEQ ID NO: 103 - protein, 498 aa, Artificial Sequence
  Pasotuxizumab
QVQLVESGGGLVKPGESLRLSCAASGFTFSDYYMYWVRQAPGKGLEWVAIISDGGYYTYYSDIIKGRFTISRDNAKNSLYLQMNSLKAEDTAVYYCARGFPLLRHGAMDYWGQGTLVTVSSGGGGSGGGGSGGGGSDIQMTQSPSSLSASVGDRVTITCKASQNVDTNVAWYQQKPGQAPKSLIYSASYRYSDVPSRFSGSASGTDFTLTISSVQSEDFATYYCQQYDSYPYTFGGGTKLEIKSGGGGSEVQLVESGGGLVQPGGSLKLSCAASGFTFNKYAMNWVRQAPGKGLEWVARIRSKYNNYATYYADSVKDRFTISRDDSKNTAYLQMNNLKTEDTAVYYCVRHGNFGNSYISYWAYWGQGTLVTVSSGGGGSGGGGSGGGGSQTVVTQEPSLTVSPGGTVTLTCGSSTGAVTSGNYPNWVQQKPGQAPRGLIGGTKFLAPGTPARFSGSLLGGKAALTLSGVQPEDEAEYYCVLWYSNRWVFGGGTKLTVL

SEQ ID NO: 104 - protein, 505 aa, Artificial Sequence
  AMG330
QVQLVQSGAEVKKPGESVKVSCKASGYTFTNYGMNWVKQAPGQGLEWMGWINTYTGEPTYADKFQGRVTMTTDTSTSTAYMEIRNLGGDDTAVYYCARWSWSDGYYVYFDYWGQGTSVTVSSGGGGSGGGGSGGGGSDIVMTQSPDSLTVSLGERTTINCKSSQSVLDSSTNKNSLAWYQQKPGQPPKLLLSWASTRESGIPDRFSGSGSGTDFTLTIDSPQPEDSATYYCQQSAHFPITFGQGTRLEIKSGGGGSEVQLVESGGGLVQPGGSLKLSCAASGFTFNKYAMNWVRQAPGKGLEWVARIRSKYNNYATYYADSVKDRFTISRDDSKNTAYLQMNNLKTEDTAVYYCVRHGNFGNSYISYWAYWGQGTLVTVSSGGGGSGGGGSGGGGSQTVVTQEPSLTVSPGGTVTLTCGSSTGAVTSGNYPNWVQQKPGQAPRGLIGGTKFLAPGTPARFSGSLLGGKAALTLSGVQPEDEAEYYCVLWYSNRWVFGGGTKLTVL

SEQ ID NO: 105 - protein, 527 aa, Artificial Sequence
  COVA420 Heavy Chain
GVTLFVALYDYTSYNTRDLSFHKGEKFQILRMEDGVWWEARSLTTGETGYIPSNYVAPVDSIQGGGGSGGGGSGGGGSQVQLVQSGGGVVQPGRSLRLSCKASGYTFTRYTMHWVRQAPGKGLEWIGYINPSRGYTNYNQKVKDRFTISRDNSKNTAFLQMDSLRPEDTGVYFCARYYDDHYCLDYWGQGTPVTVSSASTKGPSVFPLAPSSKSTSGGTAALGCLVKDYFPEPVTVSWNSGALTSGVHTFPAVLQSSGLYSLSSVVTVPSSSLGTQTYICNVNHKPSNTKVDKKVEPKSCDKTHTCPPCPAPEAAGGPSVFLFPPKPKDTLMISRTPEVTCVVVDVSHEDPEVKFNWYVDGVEVHNAKTKPREEQYNSTYRVVSVLTVLHQDWLNGKEYKCKVSNKALPAPIEKTISKAKGQPREPQVYTLPPSREEMTKNQVSLTCLVKGFYPSDIAVEWESNGQPENNYKTTPPVLDSDGSFFLYSKLTVDKSRWQQGNVFSCSVMHEALHNHYTQKSLSLSPGK

SEQ ID NO: 106 - protein, 213 aa, Artificial Sequence
  COVA420 Light Chain
DIQMTQSPSSLSASVGDRVTITCSASSSVSYMNWYQQTPGKAPKRWIYDTSKLASGVPSRFSGSGSGTDYTFTISSLQPEDIATYYCQQWSSNPFTFGQGTKLQITRTVAAPSVFIFPPSDEQLKSGTASVVCLLNNFYPREAKVQWKVDNALQSGNSQESVTEQDSKDSTYSLSSTLTLSKADYEKHKVYACEVTHQGLSSPVTKSFNRGEC

SEQ ID NO: 107 - protein, 142 aa, Homo sapiens
MGAPTLPPAWQPFLKDHRISTFKNWPFLEGCACTPERMAEAGFIHCPTENEPDLAQCFFCFKELEGWEPDDDPIEEHKKHSSGCAFLSVKKQFEELTLGEFLKLDRERAKNKIAKETNNKKKEFEETAKKVRRAIEQLAAMD

SEQ ID NO: 108 - RNA, 61 nt, Unknown
  minimal hammerhead ribozyme (HHR)
guaccuuaucaaacugaugagucccugaggacgaaacgaguaagcucgucuuugaaauggg

SEQ ID NO: 109 - RNA, 75 nt, Unknown
  structural model of a ribozyme with a stabilized stem I (STBL)
ugguaccuuaccauuucaaacugaugaguccgugaggacgaaacgaguaagcucgucuuugaaauggggggcugg

SEQ ID NO: 110 - RNA, 65 nt, Unknown
  wild type Pistol ribozyme
  misc_feature (2)..(2): n is any ribonucleotide
  misc_feature (6)..(6): n is any ribonucleotide
  misc_feature (8)..(9): n is any ribonucleotide
  misc_feature (15)..(15): n is any ribonucleotide
  misc_feature (17)..(17): n is any ribonucleotide
  misc_feature (25)..(25): n is any ribonucleotide
  misc_feature (27)..(27): n is any ribonucleotide
  misc_feature (35)..(36): n is any ribonucleotide
  misc_feature (44)..(57): n is any ribonucleotide
  misc_feature (48)..(53): May be present or up to 6 residues may be absent
  misc_feature (62)..(62): n is any ribonucleotide
  misc_feature (64)..(65): n is any ribonucleotide
rnucgnynnrgcganynuaaayarnynuuargcynnrrgcguynnnnnnnnnnnnnnrggunrnn

SEQ ID NO: 111 - RNA, 68 nt, Unknown
  wild type Pistol ribozyme
ggacucgucugagcgaguauaaacaggucauuaagcucagagcguucaccggguucggugagguuggc

SEQ ID NO: 112 - RNA, 72 nt, Paenibacillus polymyxa
ggacucgucugagcgaguauaaacaggucauuaagcucagagcguucaccggggaaauucggugagguuggc

SEQ ID NO: 113 - protein, 138 aa, Homo sapiens
QDPYVKEAENLKKYFNAGHSDVADNGTLFLGILKNWKEESDRKIMQSQIVSFYFKLFKNFKDDQSIQKSVETIKEDMNVKFFNSNKKKRDDFEKLTNYSVTDLNVQRKAIHELIQVMAELSPAAKTGKRKRSQMLFRG

SEQ ID NO: 114 - protein, 114 aa, Homo sapiens
NWVNVISDLKKIEDLIQSMHIDATLYTESDVHPSCKVTAMKCFLLELQVISLESGDASIHDTVENLIILANNSLSSNGNVTESGCKECEELEEKNIKEFLQSFVHIVQMFINTS

SEQ ID NO: 115 - protein, 237 aa, Homo sapiens
ITCPPPMSVEHADIWVKSYSLYSRERYICNSGFKRKAGTSSLTECVLNKATNVAHWTTPSLKCIRDPALVHQRPAPPSTVTTAGVTPQPESLSPSGKEPAASSPSSNNTAATTAAIVPGSQLMPSKSPSTGTTEISSHESSHGTPSQTTAKNWELTASASHQPPGVYPQGHSDTTVAISTSTVLLCGLSAVSLLACYLKSRQTPPLASVEMEAMEALPVTWGTSSRDEDLENCSHHL

SEQ ID NO: 116 - protein, 525 aa, Homo sapiens
AVNGTSQFTCFYNSRANISCVWSQDGALQDTSCQVHAWPDRRRWNQTCELLPVSQASWACNLILGAPDSQKLTTVDIVTLRVLCREGVRWRVMAIQDFKPFENLRLMAPISLQVVHVETHRCNISWEISQASHYFERHLEFEARTLSPGHTWEEAPLLTLKQKQEWICLETLTPDTQYEFQVRVKPLQGEFTTWSPWSQPLAFRTKPAALGKDTIPWLGHLLVGLSGAFGFIILVYLLINCRNTGPWLKKVLKCNTPDPSKFFSQLSSEHGGDVQKWLSSPFPSSSFSPGGLAPEISPLEVLERDKVTQLLLQQDKVPEPASLSSNHSLTSCFTNQGYFFFHLPDALEIEACQVYFTYDPYSEEDPDEGVAGAPTGSSPQPLQPLSGEDDAYCTFPSRDDLLLFSPSLLGGPSPPSTAPGGSGAGEERMPPSLQERVPRDWDPQPLGPPTPGVPDLVDFQPPPELVLREAGEEVPDAGPREGVSFPWSRPPGQGEFRALNARLPLNTDAYLSLQELQGQDPTHLV

SEQ ID NO: 117 - protein, 266 aa, Homo sapiens [sequence omitted]

SEQ ID NO: 118 - protein, 482 aa, Homo sapiens
IDETRAHLLLKEKMMRLGGRLVLNTKEELANERLMTLKIAEMKEAMRTLIFPPSMHFFQAKHLIERSQVFNILRMMPKGAALHLHDIGIVTMDWLVRNVTYRPHCHICFTPRGIMQFRFAHPTPRPSEKCSKWILLEDYRKRVQNVTEFDDSLLRNFTLVTQHPEVIYTNQNVVWSKFETIFFTISGLIHYAPVFRDYVFRSMQEFYEDNVLYMEIRARLLPVYELSGEHHDEEWSVKTYQEVAQKFVETHPEFIGIKIIYSDHRSKDVAVIAESIRMAMGLRIKFPTVVAGFDLVGHEDTGHSLHDYKEALMIPAKDGVKLPYFFHAGETDWQGTSIDRNILDALMLNTTRIGHGFALSKHPAVRTYSWKKDIPIEVCPISNQVLKLVSDLRNHPVATLMATGHPMVISSDDPAMFGAKGLSYDFYEVFMGIGGMKADLRTLKQLAMNSIKYSTLLESEKNTFMEIWKKRWDKFIADVATK

SEQ ID NO: 119 - protein, 414 aa, Homo sapiens
FRGPLLPNRPFTTVWNANTQWCLERHGVDVDVSVFDVVANPGQTFRGPDMTIFYSSQLGTYPYYTPTGEPVFGGLPQNASLIAHLARTFQDILAAIPAPDFSGLAVIDWEAWRPRWAFNWDTKDIYRQRSRALVQAQHPDWPAPQVEAVAQDQFQGAARAWMAGTLQLGRALRPRGLWGFYGFPDCYNYDFLSPNYTGQCPSGIRAQNDQLGWLWGQSRALYPSIYMPAVLEGTGKSQMYVQHRVAEAFRVAVAAGDPNLPVLPYVQIFYDTTNHFLPLDELEHSLGESAAQGAAGVVLWVSWENTRTKESCQAIKEYMDTTLGPFILNVTSGALLCSQALCSGHGRCVRRTSHPKALLLLNPASFSIQLTPGGGPLSLRGALSLEDQAQMAVEFKCRCYPGWQAPWCERKSMW

SEQ ID NO: 120 - protein, 428 aa, Homo sapiens
MELKPTAPPIFTGRPFVVAWDVPTQDCGPRLKVPLDLNAFDVQASPNEGFVNQNITIFYRDRLGLYPRFDSAGRSVHGGVPQNVSLWAHRKMLQKRVEHYIRTQESAGLAVIDWEDWRPVWVRNWQDKDVYRRLSRQLVASRHPDWPPDRIVKQAQYEFEFAAQQFMLETLRYVKAVRPRHLWGFYLFPDCYNHDYVQNWESYTGRCPDVEVARNDQLAWLWAESTALFPSVYLDETLASSRHGRNFVSFRVQEALRVARTHHANHALPVYVFTRPTYSRRLTGLSEMDLISTIGESAALGAAGVILWGDAGYTTSTETCQYLKDYLTRLLVPYVVNVSWATQYCSRAQCHGHGRCVRRNPSASTFLHLSTNSFRLVPGHAPGEPQLRPVGELSWADIDHLQTHFRCQCYLGWSGEQCQWDHRQAAGG

SEQ ID NO: 121 - protein, 471 aa, Homo sapiens
MENLKHIITLGQVIHKRCEEMKYCKKQCRRLGHRVLGLIKPLEMLQDQGKRSVPSEKLTTAMNRFKAALEEANGEIEKFSNRSNICRFLTASQDKILFKDVNRKLSDVWKELSLLLQVEQRMPVSPISQGASWAQEDQQDADEDRRAFQMLRRDNEKIEASLRRLEINMKEIKETLRQYLPPKCMQEIPQEQIKEIKKEQLSGSPWILLRENEVSTLYKGEYHRAPVAIKVFKKLQAGSIAIVRQTFNKEIKTMKKFESPNILRIFGICIDETVTPPQFSIVMEYCELGTLRELLDREKDLTLGKRMVLVLGAARGLYRLHHSEAPELHGKIRSSNFLVTQGYQVKLAGFELRKTQTSMSLGTTREKTDRVKSTAYLSPQELEDVFYQYDVKSEIYSFGIVLWEIATGDIPFQGCNSEKIRKLVAVKRQQEPLGEDCPSELREIIDECRAHDPSVRPSVDEILKKLSTFSK

SEQ ID NO: 122 - protein, 484 aa, Homo sapiens
MGSAFERVVRRVVQELDHGGEFIPVTSLQSSTGFQPYCLVVRKPSSSWFWKPRYKCVNLSIKDILEPDAAEPDVQRGRSFHFYDAMDGQIQGSVELAAPGQAKIAGGAAVSDSSSTSMNVYSLSVDPNTWQTLLHERHLRQPEHKVLQQLRSRGDNVYVVTEVLQTQKEVEVTRTHKREGSGRFSLPGATCLQGEGQGHLSQKKTVTIPSGSTLAFRVAQLVIDSDLDVLLFPDKKQRTFQPPATGHKRSTSEGAWPQLPSGLSMMRCLHNFLTDGVPAEGAFTEDFQGLRAEVETISKELELLDRELCQLLLEGLEGVLRDQLALRALEEALEQGQSLGPVEPLDGPAGAVLECLVLSSGMLVPELAIPVVYLLGALTMLSETQHKLLAEALESQTLLGPLELVGSLLEQSAPWQERSTMSLPPGLLGNSWGEGAPAWVLLDECGLELGEDTPHVCWEPQAQGRMCALYASLALLSGLSQEPH

SEQ ID NO: 123 - protein, 496 aa, Homo sapiens
MFAKATRNFLREVDADGDLIAVSNLNDSDKLQLLSLVTKKKRFWCWQRPKYQFLSLTLGDVLIEDQFPSPVVVESDFVKYEGKFANHVSGTLETALGKVKLNLGGSSRVESQSSFGTLRKQEVDLQQLIRDSAERTINLRNPVLQQVLEGRNEVLCVLTQKITTMQKCVISEHMQVEEKCGGIVGIQTKTVQVSATEDGNVTKDSNVVLEIPAATTIAYGVIELYVKLDGQFEFCLLRGKQGGFENKKRIDSVYLDPLVFREFAFIDMPDAAHGISSQDGPLSVLKQATLLLERNFHPFAELPEPQQTALSDIFQAVLFDDELLMVLEPVCDDLVSGLSPTVAVLGELKPRQQQDLVAFLQLVGCSLQGGCPGPEDAGSKQLFMTAYFLVSALAEMPDSAAALLGTCCKLQIIPTLCHLLRALSDDGVSDLEDPTLTPLKDTERFGIVQRLFASADISLERLKSSVKAVILKDSKVFPLLLCITLNGLCALGREHS

SEQ ID NO: 124 - protein, 215 aa, Homo sapiens
MGKGDPKKPRGKMSSYAFFVQTCREEHKKKHPDASVNFSEFSKKCSERWKTMSAKEKGKFEDMAKADKARYEREMKTYIPPKGETKKKFKDPNAPKRPPSAFFLFCSEYRPKIKGEHPGLSIGDVAKKLGEMWNNTAADDKQPYEKKAAKLKEKYEKDIAAYRAKGKPDAAKKGVVKAEKSKKKKEEEEDEEDEEDEEEEEDEEDEDEEEDDDDE

SEQ ID NO: 125 - protein, 26 aa, Apis mellifera
GIGAVLKVLTTGLPALISWIKRKRQQ

SEQ ID NO: 126 - protein, 239 aa, Homo sapiens
MAALKSWLSRSVTSFFRYRQCLCVPVVANFKKRCFSELIRPWHKTVTIGFGVTLCAVPIAQKSEPHSLSSEALMRRAVSLVTDSTSTFLSQTTYALIEAITEYTKAVYTLTSLYRQYTSLLGKMNSEEEDEVWQVIIGARAEMTSKHQEYLKLETTWMTAVGLSEMAAEAAYQTGADQASITARNHIQLVKLQVEEVHQLSRKAETKLAEAQIEELRQKTQEEGEERAESEQEAYLRED

SEQ ID NO: 127 - protein, 485 aa, Bothrops pauloensis
ADDGNPLEECFRETDYEEFLEIAKNGLSATSNPKHVVIVGAGMSGLSAAYVLANAGHQVTVLEASKRAGGRVRTYRNDKEGWYANLGPMRLPEKHRIVREYIRKFGLQLNEFSQENENAWYFIKNIRKRVGEVNKDPGVLEYPVKPSEVGKSAGQLYEESLQKAVEELRRTNCSYMLNKYDTYSTKEYLLKEGNLSPGAVDMIGDLLNEDSGYYVSFIESLKHDDIFAYEKRFDEIVGGMDKLPTSMYQAIQEKVRLNVRVIKIQQDVKEVTVTYQTSAKETLSVTADYVIVCTTSRAARRIKFEPPLPPKKAHALRSVHYRSGTKIFLTCTKKFWEDDGIHGGKSTTDLPSRFIYYPNHNFPSGVGVIIAYGIGDDANFFQALDFKDCGDIVINDLSLIHQLPKEEIQAFCRPSMIQRWSLDKYAMGGITTFTPYQFQHFSEALTAPVDRIYFAGEYTAQAHGWIDSTIKSGLTAARDVNRASE

SEQ ID NO: 128 - protein, 146 aa, Homo sapiens
VPIQKVQDDTKTLIKTIVTRINDISHTQSVSSKQKVTGLDFIPGLHPILTLSKMDQTLAVYQQILTSMPSRNVIQISNDLENLRDLLHVLAFSKSCHLPWASGLETLDSLGGVLEASGYSTEVVALSRLQGSLQDMLWQLDLSPGC

SEQ ID NO: 129 - protein, 209 aa, Homo sapiens
TQDCSFQHSPISSDFAVKIRELSDYLLQDYPVTVASNLQDEELCGGLWRLVLAQRWMERLKTVAGSKMQGLLERVNTEIHFVTKCAFQPPPSCLRFVQTNISRLLQETSEQLVALKPWITRQNFSRCLELQCQPDSSTLPPPWSPRPLEATAPTAPQPPLLLLLLLPVGLLLLAAAWCLHWQRTRRRTPRPGEQVPPVPSPQDLLLVEH

SEQ ID NO: 130 - protein, 281 aa, Homo sapiens [sequence omitted]

SEQ ID NO: 131 - protein, 309 aa, Homo sapiens
MSLEQRSLHCKPEEALEAQQEALGLVCVQAATSSSSPLVLGTLEEVPTAGSTDPPQSPQGASAFPTTINFTRQRQPSEGSSSREEEGPSTSCILESLFRAVITKKVADLVGFLLLKYRAREPVTKAEMLESVIKNYKHCFPEIFGKASESLQLVFGIDVKEADPTGHSYVLVTCLGLSYDGLLGDNQIMPKTGFLIIVLVMIAMEGGHAPEEEIWEELSVMEVYDGREHSAYGEPRKLLTQDLVQEKYLEYRQVPDSDPARYEFLWGPRALAETSYVKVLEYVIKVSARVRFFFPSLREAALREEEEGV

SEQ ID NO: 132 - protein, 314 aa, Homo sapiens
MPLEQRSQHCKPEEGLEARGEALGLVGAQAPATEEQEAASSSSTLVEVTLGEVPAAESPDPPQSPQGASSLPTTMNYPLWSQSYEDSSNQEEEGPSTFPDLESEFQAALSRKVAELVHFLLLKYRAREPVTKAEMLGSVVGNWQYFFPVIFSKASSSLQLVFGIELMEVDPIGHLYIFATCLGLSYDGLLGDNQIMPKAGLLIIVLAIIAREGDCAPEEKIWEELSVLEVFEGREDSILGDPKKLLTQHFVQENYLEYRQVPGSDPACYEFLWGPRALVETSYVKVLHHMVKISGGPHISYPPLHEWVLREGEE

SEQ ID NO: 133 - protein, 317 aa, Homo sapiens
MSSEQKSQHCKPEEGVEAQEEALGLVGAQAPTTEEQEAAVSSSSPLVPGTLEEVPAAESAGPPQSPQGASALPTTISFTCWRQPNEGSSSQEEEGPSTSPDAESLFREALSNKVDELAHFLLRKYRAKELVTKAEMLERVIKNYKRCFPVIFGKASESLKMIFGIDVKEVDPASNTYTLVTCLGLSYDGLLGNNQIFPKTGLLIIVLGTIAMEGDSASEEEIWEELGVMGVYDGREHTVYGEPRKLLTQDWVQENYLEYRQVPGSNPARYEFLWGPRALAETSYVKVLEHVVRVNARVRIAYPSLREAALLEEEEGV

SEQ ID NO: 134 - protein, 314 aa, Homo sapiens
MPLEQRSQHCKPEEGLEAQGEALGLVGAQAPATEEQETASSSSTLVEVTLREVPAAESPSPPHSPQGASTLPTTINYTLWSQSDEGSSNEEQEGPSTFPDLETSFQVALSRKMAELVHFLLLKYRAREPFTKAEMLGSVIRNFQDFFPVIFSKASEYLQLVFGIEVVEVVRIGHLYILVTCLGLSYDGLLGDNQIVPKTGLLIIVLAIIAKEGDCAPEEKIWEELSVLEASDGREDSVFAHPRKLLTQDLVQENYLEYRQVPGSDPACYEFLWGPRALVETSYVKVLHHLLKISGGPHISYPPLHEWAFREGEE

SEQ ID NO: 135 - protein, 373 aa, Homo sapiens
MPPVPGVPFRNVDNDSPTSVELEDWVDAQHPTDEEEEEASSASSTLYLVFSPSSFSTSSSLILGGPEEEEVPSGVIPNLTESIPSSPPQGPPQGPSQSPLSSCCSSFSWSSFSEESSSQKGEDTGTCQGLPDSESSFTYTLDEKVAELVEFLLLKYEAEEPVTEAEMLMIVIKYKDYFPVILKRAREFMELLFGLALIEVGPDHFCVFANTVGLTDEGSDDEGMPENSLLIIILSVIFIKGNCASEEVIWEVLNAVGVYAGREHFVYGEPRELLTKVWVQGHYLEYREVPHSSPPYYEFLWGPRAHSESIKKKVLEFLAKLNNTVPSSFPSWYKDALKDVEERVQATIDTADDATVMASESLSVMSSNVSFSE

SEQ ID NO: 136 - protein, 26 aa, Homo sapiens
RLMKEESPVVSWRLEPEDGTALCFIF

SEQ ID NO: 137 - protein, 117 aa, Homo sapiens
MSWRGRSTYYWPRPRRYVQPPEMIGPMRPEQFSDEVEPATPEEGEPATQRQDPAAAQEGEDEGASAGQGPKPEADSQEQGHPQTGCECEDGPDGQEMDPPNPEEVKTPEEGEGQSQC

SEQ ID NO: 138 - protein, 81 aa, Homo sapiens
MESPKKKNQQLKVGILHLGSRQKKIRIQLRSQCATWKVICKSCISQTPGINLDLGSGVKVKIIPKEEHCKMPEAGEEQPQV

SEQ ID NO: 139 - protein, 210 aa, Homo sapiens
MQAEGRGTGGSTGDADGPGGPGIPDGPGGNAGGPGEAGATGGRGPRGAGAARASGPRGGAPRGPHGGAASAQDGRCPCGARRPDSRLLELHITMPFSSPMEAELVRRILSRDAAPLPRPGAVLKDFTVSGNLLFMSVRDQDREGAGRMRVVGWGLGSASPEGQKARDLRTPKHKVSEQRPGTPGPPPPEGAQGDGCRGVAFNVMFSAPHI

SEQ ID NO: 140 - protein, 180 aa, Homo sapiens
MQAEGRGTGGSTGDADGPGGPGIPDGPGGNAGGPGEAGATGGRGPRGAGAARASGPGGGAPRGPHGGAASGLNGCCRCGARGPESRLLEFYLAMPFATPMEAELARRSLAQDAPPLPVPGVLLKEFTVSGNILTIRLTAADHRQLQLSISSCLQQLSLLMWITQCFLPVFLAQPPSGQRR

SEQ ID NO: 141 - protein, 188 aa, Homo sapiens
MNGDDAFARRPTVGAQIPEKIQKAFDDIAKYFSKEEWEKMKASEKIFYVYMKRKYEAMTKLGFKATLPPFMCNKRAEDFQGNDLDNDPNRGNQVERPQMTFGRLQGISPKIMPKKPAEEGNDSEEVPEASGPQNDGKELCPPGKPTTSEKIHERSGPKRGEHAWTHRLRERKQLVIYEEISDPEEDDE

SEQ ID NO: 142 - protein, 113 aa, Homo sapiens
MNFYLLLASSILCALIVFWKYRRFQRNTGEMSSNSTALALVRPSSSGLINSNTDNNLAVYDLSRDILNNFPHSIARQKRILVNLSMVENKLVELEHTLLSKGFRGASPHRKST

SEQ ID NO: 143 - protein, 904 aa, Homo sapiens
MQASPLQTSQPTPPEELHAAAYVFTNDGQQMRSDEVNLVATGHQSKKKHSRKSKRHSSSKRRKSMSSWLDKQEDAAVTHSICEERINNGQPVADNVLSTAPPWPDATIAHNIREERMENGQSRTDKVLSTAPPQLVHMAAAGIPSMSTRDLHSTVTHNIREERMENGQPQPDNVLSTGPTGLINMAATPIPAMSARDLYATVTHNVCEQKMENVQPAPDNVLLTLRPRRINMTDTGISPMSTRDPYATITYNVPEEKMEKGQPQPDNILSTASTGLINVAGAGTPAISTNGLYSTVPHNVCEEKMENDQPQPNNVLSTVQPVIIYLTATGIPGMNTRDQYATITHNVCEERVVNNQPLPSNALSTVLPGLAYLATADMPAMSTRDQHATIIHNLREEKKDNSQPTPDNVLSAVTPELINLAGAGIPPMSTRDQYATVNHHVHEARMENGQRKQDNVLSNVLSGLINMAGASIPAMSSRDLYATITHSVREEKMESGKPQTDKVISNDAPQLGHMAAGGIPSMSTKDLYATVTQNVHEERMENNQPQPSYDLSTVLPGLTYLTVAGIPAMSTRDQYATVTHNVHEEKIKNGQAASDNVFSTVPPAFINMAATGVSSMSTRDQYAAVTHNIREEKINNSQPAPGNILSTAPPWLRHMAAAGISSTITRDLYVTATHSVHEEKMTNGQQAPDNSLSTVPPGCINLSGAGISCRSTRDLYATVIHDIQEEEMENDQTPPDGFLSNSDSPELINMTGHCMPPNALDSFSHDFTSLSKDELLYKPDSNEFAVGTKNYSVSAGDPPVTVMSLVETVPNTPQISPAMAKKINDDIKYQLMKEVRRFGQNYERIFILLEEVQGSMKVKRQFVEFTIKEAARFKKVVLIQQLEKALKEIDSHCHLRKVKHMRKR

SEQ ID NO: 144 - protein, 151 aa, Homo sapiens
MSIPFSNTHYRIPQGFGNLLEGLTREILREQPDNIPAFAAAYFESLLEKREKTNFDPAEWGSKVEDRFYNNHAFEEQEPPEKSDPKQEESQISGKEEETSVTILDSSEEDKEKEEVAAVKIQAAFRGHIAREEAKKMKTNSLQNEEKEENK

SEQ ID NO: 145 - protein, 432 aa, Homo sapiens
MLGNSAPGPATREAGSALLALQQTALQEDQENINPEKAAPVQQPRTRAALAVLKSGNPRGLAQQQRPKTRRVAPLKDLPVNDEHVTVPPWKANSKQPAFTIHVDEAEKEAQKKPAESQKIEREDALAFNSAISLPGPRKPLVPLDYPMDGSFESPHTMDMSIILEDEKPVSVNEVPDYHEDIHTYLREMEVKCKPKVGYMKKQPDITNSMRAILVDWLVEVGEEYKLQNETLHLAVNYIDRFLSSMSVLRGKLQLVGTAAMLLASKFEEIYPPEVAEFVYITDDTYTKKQVLRMEHLVLKVLTFDLAAPTVNQFLTQYFLHQQPANCKVESLAMFLGELSLIDADPYLKYLPSVIAGAAFHLALYTVTGQSWPESLIRKTGYTLESLKPCLMDLHQTYLKAPQHAQQSIREKYKNSKYHGVSLLNPPETLNL

SEQ ID NO: 146 - protein, 833 aa, Homo sapiens
MSPEKQHREEDEVDSVLLSASKILNSSEGVKESGCSDTEYGCIAESENQIQPQSALKVLQQQLESFQALRMQTLQNVSMVQSEISEILNKSIIEVENPQFSSEKNLVFGTRIEKDLPTENQEENLSMEKSHHFEDSKTLHSVEEKLSGDSVNSLPQSVNVPSQIHSEDTLTLRTSTDNLSSNIIIHPSENSDILKNYNNFYRFLPTAPPNVMSQADTVILDKSKITVPFLKHGFCENLDDICHSIKQMKEELQKSHDGEVALTNELQTLQTDPDVHRNGKYDMSPIHQDKMNFIKEENLDGNLNEDIKSKRISELEALVKKLLPFRETVSKFHVHFCRKCKKLSKSEMHRGKKNEKNNKEIPITGKNITDLKFHSRVPRYTLSFLDQTKHEMKDKERQPFLVKQGSIISENEKTSKVNSVTEQCVAKIQYLQNYLKESVQIQKKVMELESENLNLKSKMKPLIFTTQSLIQKVETYEKQLKNLVEEKSTIQSKLSKTEEYSKECLKEFKKIISKYNVLQGQNKTLEEKNIQLSLEKQQMMEALDQLKSKEHKTQSDMAIVNNENNRMSIEMEAMKTNILLIQDEKEMLEKKTHQLLKEKSSLGNELKESQLEIIQLKEKERLAKTEQETLLQIIETVKDEKLNLETTLQESTAARQIMEREIENIQTYQSTAEENFLQEIKNAKSEASIYKNSLSEIGKECEMLSKMVMETKTDNQILKEELKKHSQENIKFENSISRLTEDKILLENYVRSIENERDTLEFEMRHLQREYLSLSDKICNQHNDPSKTTYISRREKFHFDNYTHEDTSSPQSRPLASDLKGYFKVKDRTLKHH

SEQ ID NO: 147 - protein, 386 aa, Lymphocryptovirus Human gammaherpesvirus 4
MEHDLERGPPGPRRPPRGPPLSSSLGLALLLLLLALLFWLYIVMSDWTGGALLVLYSFALMLIIIILIIFIFRRDLLCPLGALCILLLMITLLLIALWNLHGQALFLGIVLFIFGCLLVLGIWIYLLEMLWRLGATIWQLLAFFLAFFLDLILLIIALYLQQNWWTLLVDLLWLLLFLAILIWMYYHGQRHSDEHHHDDSLPHPQQATDDSGHESDSNSNEGRHHLLVSGAGDGPPLCSQNLGAPGGGPDNGPQDPDNTDDNGPQDPDNTDDNGPHDPLPQDPDNTDDNGPQDPDNTDDNGPHDPLPHSPSDSAGNDGGPPQLTEEVENKGGDQGPPLMTDGGGGHSHDSGHGGGDPHLPTLLLGSSGSGGDDDDPHGPVQLSYYD

SEQ ID NO: 148 - protein, 497 aa, Lymphocryptovirus Human gammaherpesvirus 4
MGSLEMVPMGAGPPSPGGDPDGYDGGNNSQYPSASGSSGNTPTPPNDEERESNEEPPPPYEDPYWGNGDRHSDYQPLGTQDQSLYLGLQHDGNDGLPPPPYSPRDDSSQHIYEEAGRGSMNPVCLPVIVAPYLFWLAAIAASCFTASVSTVVTATGLALSLLLLAAVASSYAAAQRKLLTPVTVLTAVVTFFAICLTWRIEDPPFNSLLFALLAAAGGLQGIYVLVMLVLLILAYRRRWRRLTVCGGIMFLACVLVLIVDAVLQLSPLLGAVTVVSMTLLLLAFVLWLSSPGGLGTLGAALLTLAAALALLASLILGTLNLTTMFLLMLLWTLVVLLICSSCSSCPLSKILLARLFLYALALLLLASALIAGGSILQTNFKSLSSTEFIPNLFCMLLLIVAGILFILAILTEWGSGNRTYGPVFMCLGGLLTMVAGAVWLTVMSNTLLSAWILTAGFLIFLIGFALFGVIRCCRYCCYYCLTLESEERPPTPYRNTV

SEQ ID NO: 149 - RNA, 144 nt, Artificial Sequence
  cis-acting replication element (CRE)
gaucacaacaccgaagaaauggaaaacucugcugaucgagucacaacgcaaacggcgggcaacacugccauaaacacgcaaucaucauuggguguguugugugccuacguugaagacccgaccaaaucugauccuccguccagc
